(19) United States
(12) Patent Application Publication
(10) Pub. No.: US 2022/0054632 A1
(43) Pub. Date: Feb. 24, 2022

(54) MODIFIED CARRIER PROTEINS FOR O-LINKED GLYCOSYLATION

(71) Applicant: GLAXOSMITHKLINE BIOLOGICALS SA, Rixensart (BE)

(72) Inventors: Rainer FOLLADOR, Schlieren (CH); Stefan Jochen KEMMLER, Schlieren (CH); Michael Thomas KOWARIK, Schlieren (CH); Gerald Johann POSCH, Schlieren (CH)

(73) Assignee: GLAXOSMITHKLINE BIOLOGICALS SA, Rixensart (BE)

(21) Appl. No.: 17/299,347

(22) PCT Filed: Dec. 11, 2019
(86) PCT No.: PCT/EP2019/084632

§ 371 Date: Jun. 3, 2021

(30) Foreign Application Priority Data
Dec. 12, 2018 (EP) 18212100.4

(51) Int. Cl. A61K 39/385; C07K 14/22; C07K 14/28; C07K 14/33; C07K 14/34; C07K 14/21; C07K 14/205; C07K 14/245; C12N 15/70

(52) U.S. Cl. CPC A61K 39/385; C07K 14/22; C07K 14/28; C07K 14/33; A61K 2039/6068; C07K 14/21; C07K 14/205; C07K 14/245; C12N 15/70; C07K 14/34

(57) ABSTRACT

Carrier proteins modified to incorporate one or more pilin glycotags and applications thereof for O-linked glycosylation are provided. In particular, a modified carrier protein comprising a carrier protein that comprises at least one GlycoTag, wherein the at least one GlycoTag is a Neisseria gonorrhoeae PglL GlycoTag (NgGlycoTag), Neisseria lactamica PglL GlycoTag (NlGlycoTag), or Neisseria shayeganii GlycoTag (NsGlycoTag), or combinations thereof is provided, together with nucleic acids and vectors encoding the modified carrier protein, host cells comprising these modofoed carrier proteins or nucleic acids encoding them, bioconjugates, methods of making bioconjugates and uses of the bioconjugates.

### REFERENCE TO SEQUENCE LISTING

[0001] The instant application contains an electronically submitted Sequence Listing in ASCII text file format which is hereby incorporated by reference in its entirety.

### FIELD OF THE INVENTION

[0002] The field of the invention generally relates to modified carrier proteins comprising one or more GlycoTags and the use of such modified carrier proteins in efficient O-linked glycosylation, for example using PglL.

### BACKGROUND OF THE INVENTION

[0003] Protein glycosylation is a common posttranslational modification in bacteria by which glycans are covalently attached to surface proteins, flagella, or pili, for example. [1]. Glycoproteins play roles in adhesion, stabilization of proteins against proteolysis, and evasion of the host immune response. [1]. Two protein glycosylation mechanisms are distinguished by the mode in which the glycans are transferred to proteins: one mechanism involves the transfer of carbohydrates directly from nucleotide-activated sugars to acceptor proteins (used in, e.g., protein O-glycosylation in the Golgi apparatus of eukaryotic cells and flagellin O-glycosylation in some bacteria). A second mechanism involves the preassembly of a polysaccharide onto a lipid-carrier (by glycosyltransferases) which is then transferred to a protein acceptor by an oligosaccharyltransferase (OTase). [1]. This second mechanism is used in, e.g., N-glycosylation in the endoplasmic reticulum of eukaryotic cells, the well-characterized N-linked glycosylation system of Campylobacter jejuni, and the more recently characterized O-linked glycosylation systems of Neisseria meningitidis, Neisseria gonococcus, and Pseudomonas aeruginosa. [1]. For O-linked glycosylation (O-glycosylation), glycans are generally attached to a serine or threonine residue on the protein acceptor. For N-linked glycosylation (N-glycosylation), glycans are generally attached to an asparagine residue on the protein acceptor. See generally [2].

[0004] The two best understood glycosylation systems are the C. jejuni N-linked glycosylation system and the Neisseria O-linked glycosylation system. [1], [3]. In these two systems, a polysaccharide (glycan donor) linked to an undecaprenyl pyrophosphate (UndPP) lipid-carrier is translocated (flipped) to the periplasm by a flippase. [2], [3]. In the periplasm, an oligosaccharyltransferase (OTase) transfers the glycan to a protein acceptor (pilin). [2], [3]. The OTase of C. jejuni (PglB) transfers the glycan to the asparagine (N) in the conserved pilin pentapeptide motif D/E-X₁-N-X₂-S/T (where X₁ and X₂ are any residues except proline). [4]. The OTase of N. meningitidis (NmPglL) transfers the glycan to Ser63 in the N. meningitidis pilin PilE sequence (“sequon”) (N)-SAVTEYYLNHGEWPGNNTSAGVATSSEIK-(C) (SEQ ID NO: 140, corresponding to residues 45-73 of mature N. meningitidis PilE sequence SEQ ID NO: 137). [1], [3], [5]. Until this disclosure, the pilin sequence onto which other OTases (from N. gonorrhoeae, N. lactamica, or N. shayeganii for example) transfer glycan was not known (see [6]).

[0005] Conjugate vaccines (comprising a carrier protein covalently linked to an immunogenic glycan) have been a successful approach for vaccination against a variety of bacterial infections. However, the chemical methods by which they are routinely produced are complex and comparatively inefficient ([4] at FIG. 1). To increase conjugate vaccine production efficiency, in vivo methods (hence “bioconjugate vaccine”) have been in development. These in vivo methods leverage the N-glycosylation and O-glycosylation systems discussed above, particularly the OTase sequons, so that proteins which are not otherwise glycosylated by the OTase (carrier proteins), are glycosylated in vivo.

[0006] For example, carrier proteins AcrA and EPA were N-glycosylated in E. coli using heterologous polysaccharide as glycan donors and C. jejuni PglB because AcrA and EPA were first modified to incorporate an appropriate periplasmic signal sequence and at least one copy of the PglB sequon sequence D/E-X₁-N-X₂-S/T (a “GlycoTag”). [4]; see also [7], [8], [9], [10], [11] (all of which are incorporated herein by reference in their entireties). The use of PglB-based bioconjugation production is limited because PglB only accepts certain sugar substrates: those containing an acetamido group at position C-2 of the reducing end and those that do not possess a β1, 4 linkage between the first two sugars (i.e., the linkage between sugars “S-2” and “S-1”, the first sugar (S-1) comprising the reducing end and S-2 being adjacent to S-1). [3], [12], [13].

[0007] To overcome this limitation of PglB-based systems and because Neisserial PglLs are “promiscuous” with respect to sugar substrates ([3]), an O-glycosylation system using the PglL OTase from Neisseria meningitidis has been the focus of recent work ([1], [14], [15], [16]; see also [6]).

[0008] For example, carrier proteins EPA, TTc, and CTB were O-glycosylated by N. meningitidis PglL in Shigella flexneri using polysaccharides which were endogenous to the Shigella flexneri host cell as glycan donors (“endogenous polysaccharide”) because each carrier protein was modified to incorporate a periplasmic signal sequence and one copy of the N. meningitidis PilE sequon sequence
[0009] (N)-SAVTEYYLNHGEWPGNNTSAGVATSSEIK-(C) (SEQ ID NO: 140)
   (EPA and TTc modified at their N-terminuses, CTB modified at C-terminus). [3]. O-glycosylation was also achieved for those modified EPA and CTB carrier proteins in E. coli and Salmonella enterica using NmPglL and endogenous polysaccharides. [3]. Smaller NmGlycoTags were also demonstrated (all fragments of the sequence SEQ ID NO: 140), the smallest being 12 amino acids in length (successfully used if two hydrophilic fragments flanked it) ([3] at 6).

[0010] But like its predecessor, the applicability of this NmPglL work is limited at least because only O-glycosylation by NmPglL paired with NmPilE sequon sequences was demonstrated and the system showed an unfortunate bias toward CTB as carrier protein (CTB was more effective than the desirable carrier protein, EPA). [3]; see also [5].

[0011] An array of PglL OTases and pilin sequons are needed that may be optimally paired for efficient O-glycosylation of a variety of carrier proteins, especially EPA, and at internal glycosylation sites.

### SUMMARY OF THE INVENTION

[0012] In one aspect, the present invention is the first to describe certain pilin sequences and modified carrier proteins comprising them, optionally wherein the pilin sequence is O-glycosylated by an OTases from NmPglL or a homologue thereof (such as OTases from N. gonorrhoeae, N. lactamica, or N. shayeganii). In another aspect, the present invention provides efficient O-glycosylation of a variety of glycotagged carrier proteins, especially EPA, and with GlycoTags located at N-terminal, C-terminal, and/or internal carrier protein residues (internal GlycoTags being expected to improve conjugate characteristics such as stability over time).

[0013] Embodiments of the present invention include, but are not limited to:
[0014] 1. A modified carrier protein comprising a carrier protein that comprises at least one GlycoTag, wherein the at least one GlycoTag is a Neisseria gonorrhoeae PglL GlycoTag (NgGlycoTag), Neisseria lactamica PglL GlycoTag (NlGlycoTag), or Neisseria shayeganii GlycoTag (NsGlycoTag), or combinations thereof.
[0015] 2. The modified carrier protein of embodiment 1, wherein the at least one GlycoTag is located at the N-terminus, C-terminus, and/or interior of the carrier protein.
[0016] 3. The modified carrier protein of embodiment 1 or 2, wherein the at least one NgGlycoTag consists of a peptide sequence that is 12 to 30 amino acids long and comprises therein the sequence SEQ ID NO: 147. For example the NgGlycoTag is 12, 13, 14, 15, 16, 17, 18, 19, 20, 21, 22, 23, 24, 25, 26, 27, 28, 29 or 30 amino acids long or 13-29, 14-28, 15-27, 16-25, 17-24, 18-13, 12-25, 12-20 or 12-15 amino acids long. In an embodiment 1, 2, 3, 4 or 5 or 1-5, 1-4, 1-3 or 1-2 amino acid substitution(s), where the amino acid is altered from the amino acid at that position of SEQ ID NO: 147 is present in the NgGlycoTag amino acid sequence. In an embodiment, the amino acid substitution(s) is a conservative substitution(s).
[0017] 4. The modified carrier protein of embodiment 1, 2, or 3, wherein the at least one NgGlycoTag consists of a peptide sequence that is 30 amino acids long and comprises therein the sequence SEQ ID NO: 147.
[0018] 5. The modified carrier protein of embodiment 4, wherein the at least one NgGlycoTag consists of a peptide sequence that is SEQ ID NO: 145. In an embodiment 1, 2, 3, 4 or 5 or 1-5, 1-4, 1-3 or 1-2 amino acid substitution(s), where the amino acid is altered from the amino acid at that position of SEQ ID NO: 145 is present in the NgGlycoTag amino acid sequence. In an embodiment, the amino acid substitution(s) is a conservative substitution(s).
[0019] 6. The modified carrier protein of embodiment 1, 2, or 3, wherein the at least one NgGlycoTag consists of a peptide sequence that is 20 amino acids long and comprises therein the sequence SEQ ID NO: 147.
[0020] 7. The modified carrier protein of embodiment 6, wherein the at least one NgGlycoTag consists of a peptide sequence that is SEQ ID NO: 146.
[0021] 8. The modified carrier protein of embodiment 3, wherein the at least one NgGlycoTag consists of a peptide sequence that is SEQ ID NO: 147.
   [0022] In certain embodiments, the modified carrier protein has the amino acid sequence of one of SEQ ID NOs: 101, 113, 115, 117, 119, 121, 123, 125, 127, 129, 131, and 133.
[0023] 9. The modified carrier protein of embodiment 1 or 2, wherein the at least one NlGlycoTag consists of a peptide sequence that is 12 to 35 amino acids long and comprises therein the sequence SEQ ID NO: 151. For example the NlGlycoTag is 12, 13, 14, 15, 16, 17, 18, 19, 20, 21, 22, 23, 24, 25, 26, 27, 28, 29 or 30 amino acids long or 13-29, 14-28, 15-27, 16-25, 17-24, 18-13, 12-25, 12-20 or 12-15 amino acids long. In an embodiment 1, 2, 3, 4 or 5 or 1-5, 1-4, 1-3 or 1-2 amino acid substitution(s), where the amino acid is altered from the amino acid at that position of SEQ ID NO:151 is present in the NlGlycoTag amino acid sequence. In an embodiment, the amino acid substitution(s) is a conservative substitution(s).
[0024] 10. The modified carrier protein of embodiment 9, wherein the at least one NlGlycoTag consists of a peptide sequence that is 35 amino acids long and comprises therein the sequence SEQ ID NO: 151.
[0025] 11. The modified carrier protein of embodiment 9 or 10, wherein the at least one NlGlycoTag consists of a peptide sequence that is SEQ ID NO: 150.
[0026] 12. The modified carrier protein of embodiment 9, wherein the at least one NlGlycoTag consists of a peptide sequence that is SEQ ID NO: 151.
   [0027] In certain embodiments, the modified carrier protein has the amino acid sequence SEQ ID NO: 103.
[0028] 13. The modified carrier protein of embodiment 1 or 2, wherein the at least one NsGlycoTag consists of a peptide sequence that is 12 to 31 amino acids long and comprises therein the sequence SEQ ID NO: 164. For example the NsGlycoTag is 12, 13, 14, 15, 16, 17, 18, 19, 20, 21, 22, 23, 24, 25, 26, 27, 28, 29 or 30 amino acids long or 13-29, 14-28, 15-27, 16-25, 17-24, 18-13, 12-25, 12-20 or 12-15 amino acids long. In an embodiment 1, 2, 3, 4 or 5 or 1-5, 1-4, 1-3 or 1-2 amino acid substitution(s), where the amino acid is altered from the amino acid at that position of SEQ ID NO:164 is present in the NsGlycoTag amino acid sequence. In an embodiment, the amino acid substitution(s) is a conservative substitution(s).
[0029] 14. The modified carrier protein of embodiment 13 wherein the at least one NsGlycoTag consists of a peptide sequence that is 31 amino acids long and comprises therein the sequence SEQ ID NO: 164.
[0030] 15. The modified carrier protein of embodiment 13 or 14, wherein the at least one NsGlycoTag consists of a peptide sequence that is SEQ ID NO: 163.
[0031] 16. The modified carrier protein of embodiment 13, wherein the at least one NsGlycoTag consists of a peptide sequence that is SEQ ID NO: 164.
[0032] 17. The modified carrier protein of one of embodiments 1 to 16, further comprising at least one Neisseria meningitidis PglL GlycoTag (NmGlycoTag).
   [0033] In certain embodiments, the modified carrier protein has the amino acid sequence SEQ ID NO: 111.
[0034] 18. A modified carrier protein comprising a carrier protein that comprises at least one GlycoTag, wherein the at least one GlycoTag is a Neisseria meningitidis PglL GlycoTag (NmGlycoTag) consisting of a peptide sequence that is 12 to 19 amino acids long and comprises therein the sequence 142. For example the NmGlycoTag is 12, 13, 14, 15, 16, 17, 18, 19, 20, 21, 22, 23, 24, 25, 26, 27, 28, 29 or 30 amino acids long or 13-29, 14-28, 15-27, 16-25, 17-24, 18-13, 12-25, 12-20 or 12-15 amino acids long. In an embodiment 1, 2, 3, 4 or 5 or 1-5, 1-4, 1-3 or 1-2 amino acid substitution(s), where the amino acid is altered from the amino acid at that position of SEQ ID NO: 142 is present in the NmGlycoTag amino acid sequence. In an embodiment, the amino acid substitution(s) is a conservative substitution(s).
[0035] 19. The modified carrier protein of embodiment 18, wherein the at least one NmGlycoTag consists of a peptide sequence that is 19 amino acids long and comprises therein the sequence SEQ ID NO: 142.
[0036] 20. The modified carrier protein of embodiment 18 or 19, wherein the at least one NmGlycoTag consists of a peptide sequence that is SEQ ID NO: 141.
[0037] 21. The modified carrier protein of embodiment 18, wherein the at least one NmGlycoTag consists of a peptide sequence that is SEQ ID NO: 142.
   [0038] Certain embodiments are provided with the proviso that the NmGlycoTag does not consist of the sequence SEQ ID NO: 140.
   [0039] In certain embodiments, the modified carrier protein has the amino acid sequence of one of SEQ ID NOs: 51, 53, 55, 57, 59, 61, 63, 65, 67, 69, 71, 73, 75, 77, 79, 81, 83, 85, 87, 89, 91, 93, 95, 97, 99, 101, 103, 105, 107, 109, 111, 113, 115, 117, 119, 121, 123, 125, 127, 129, 131, 133, 135, 199, 202, and 204.
[0040] 22. The modified carrier protein of one of embodiments 1-21, wherein the carrier protein is selected from the group consisting of cholera toxin b subunit (CTB), tetanus toxoid (TT), tetanus toxin C fragment (TTc), diphtheria toxoid (DT), CRM197, Pseudomonas aeruginosa exotoxin A (EPA), C. jejuni Acriflavine resistance protein A (CjAcrA), E. coli Acriflavine resistance protein A (EcAcrA), and Pseudomonas aeruginosa PcrV (PcrV).
[0041] 23. The modified carrier protein of one of embodiments 1-22, wherein the carrier protein is EPA.
[0042] 24. The modified carrier protein of embodiment 23, wherein the at least one GlycoTag is located at, numbered with respect to SEQ ID NO: 1, residue A14, D36, Q92, G123, E157, A177, Y208, N231, E252, R274, A301, Q307, A365, S408, T418, A464, A519, G525, A533, S585, K240, or A375, or combinations thereof. In an embodiment, residue A14, D36, Q92, G123, E157, A177, Y208, N231, E252, R274, A301, Q307, A365, S408, T418, A464, A519, G525, A533, S585, K240, or A375, or combinations thereof is/are substituted with the at least one GlycoTag.
[0043] 25. A modified carrier protein, characterized by a Pseudomonas aeruginosa exotoxin A (EPA) carrier protein comprising at least one Neisseria meningitidis PglL GlycoTag (NmGlycoTag), wherein the at least one NmGlycoTag is located at, with respect to SEQ ID NO: 1, residue A14, D36, Q92, G123, E157, A177, Y208, N231, E252, R274, A301, Q307, A365, S408, T418, A464, A519, G525, A533, S585, K240, or A375, or combinations thereof. In an embodiment, residue A14, D36, Q92, G123, E157, A177, Y208, N231, E252, R274, A301, Q307, A365, S408, T418, A464, A519, G525, A533, S585, K240, or A375, or combinations thereof are substituted with the NmGlycoTag
[0044] 26 The modified carrier protein of embodiment 25, wherein the at least one NmGlycoTag consists of a peptide sequence that is 12 to 29 amino acids long and comprises therein the sequence SEQ ID NO: 142.
[0045] 27. The modified carrier protein of embodiment 25 or 26, wherein the at least one NmGlycoTag consists of a peptide sequence that is 29 amino acids long and comprises therein the sequence SEQ ID NO: 142.
[0046] 28. The modified carrier protein of embodiment 25, 26, or 27, wherein the at least one NmGlycoTag consists of a peptide sequence that is SEQ ID NO: 140.
[0047] 29. The modified carrier protein of embodiment 25 or 26, wherein the at least one NmGlycoTag consists of a peptide sequence that is 19 amino acids long and comprises therein the sequence SEQ ID NO: 142.
[0048] 30. The modified carrier protein of one of embodiment 25-29, wherein the at least one NmGlycoTag consists of a peptide sequence that is SEQ ID NO: 141.
[0049] 31. The modified carrier protein of embodiment 25 or 26, wherein the at least one NmGlycoTag consists of a peptide sequence that is SEQ ID NO: 142.
[0050] 32. The modified carrier protein of embodiment 25, comprising at least a second GlycoTag located at the N-terminus, C-terminus, and/or interior of the carrier protein.
[0051] 33. The modified carrier protein of embodiment 32, comprising two or more GlycoTags and wherein at least the second GlycoTag is a NgGlycoTag, NlGlycoTag, or NsGlycoTag.
   [0052] Certain embodiments are provided with the proviso that the NmGlycoTag does not consist of the sequence SEQ ID NO: 140.
   [0053] In certain embodiments, the modified carrier protein has the amino acid sequence of one of SEQ ID NOs: 51, 53, 55, 57, 59, 61, 63, 65, 67, 69, 71, 73, 75, 77, 79, 81, 83, 85, 87, 89, 91, 93, 95, 97, 99, 101, 103, 105, 107, 109, 111, 113, 115, 117, 119, 121, 123, 125, 127, 129, 131, 133, and 135.
[0054] 34. The modified carrier protein of one of embodiments 1-33, further comprising one or more GlycoTag-flanking Peptide (G-f Peptide).
[0055] 35. The modified carrier protein of one of embodiment 1-34, wherein the one or more G-f Peptide is located at the N-terminus, C-terminus, or combinations thereof, of a GlycoTag.
[0056] 36. The modified carrier protein of one of embodiment 1-34, wherein the one or more G-f Peptide is adjacent to a GlycoTag.
   [0057] The modified carrier protein of any one of embodiments 1-36, wherein the modified carrier protein is coupled to (optionally covalently coupled to) a glycan at one or more of the GlycoTags.
      [0058] The modified carrier protein above, wherein the glycan is a PglL Glycan Substrate.
      [0059] The modified carrier protein above, wherein the glycan has a reducing end structure of
      [0060] (i) a reducing end structure of Glucose, Galactose, Galactofuranose, Rhamnose, GlcNAc, GalNAc, FucNAc, DATDH, GATDH, HexNAc, deoxy HexNAc, diNAcBac, or Pse;
      [0061] (ii) a reducing end structure of DATDH, GlcNAc, GalNAc, FucNAc, Galactose, or Glucose;
      [0062] (iii) a reducing end structure of GlcNAc, GalNAc, FucNAc, or Glucose; or
      [0063] (iv) a S-2 to S-1 reducing end structure of Galactose-β1,4-Glucose; Glucuronic acid-β1,4-glucose; N-acetyl-fucosamine-α1,3-N-acetyl-galactosamine; Galactose-β1,4-glucose; Rhamnose-β1,4-glucose; Galactofuranose-β1,3-glucose; N-acetyl-altruronic acid-α1,3-4-amino-N-acetyl-fucosamine; or Rhamnose-β1,4-N-acetylgalactosamine.
      [0064] The modified carrier protein above, wherein the glycan is a
         [0065] Shigella glycan (e.g. a Shigella sonnei glycan (such as S. sonnei O-antigen), or a Shigella flexneri glycan (such as Shigella flexneri 2a CPS), or a Shigella dysenteriae glycan)
         [0066] or a Streptococcus glycan (e.g. Streptococcus pneumoniae (such as Streptococcus pneumoniae sp. 12F CPS, S. pneumoniae sp. 8 CPS, S. pneumoniae sp. 14 CPS, S. pneumoniae sp. 23A CPS, S. pneumoniae sp. 33F CPS, or S. pneumoniae sp. 22A CPS).
      [0067] The modified carrier protein above, wherein (a) the glycan is a
         [0068] Shigella glycan (e.g. a Shigella sonnei glycan (such as S. sonnei O-antigen), or a Shigella flexneri glycan (such as Shigella flexneri 2a CPS), or a Shigella dysenteriae glycan)
         [0069] or a Streptococcus glycan (e.g. Streptococcus pneumoniae (such as Streptococcus pneumoniae sp. 12F CPS, S. pneumoniae sp. 8 CPS, S. pneumoniae sp. 14 CPS, S. pneumoniae sp. 23A CPS, S. pneumoniae sp. 33F CPS, or S. pneumoniae sp. 22A CPS); and
         [0070] (b) the glycan has a reducing end structure of
            [0071] (i) a reducing end structure of Glucose, Galactose, Galactofuranose, Rhamnose, GlcNAc, GalNAc, FucNAc, DATDH, GATDH, HexNAc, deoxy HexNAc, diNAcBac, or Pse;
            [0072] (ii) a reducing end structure of DATDH, GlcNAc, GalNAc, FucNAc, Galactose, or Glucose;
            [0073] (iii) a reducing end structure of GlcNAc, GalNAc, FucNAc, or Glucose; or
            [0074] (iv) a S-2 to S-1 reducing end structure of Galactose-β1,4-Glucose; Glucuronic acid-β1,4-glucose; N-acetyl-fucosamine-α1,3-N-acetyl-galactosamine; Galactose-β1,4-glucose; Rhamnose-β1,4-glucose; Galactofuranose-β1,3-glucose; N-acetyl-altruronic acid-α1,3-4-amino-N-acetyl-fucosamine; or Rhamnose-β1,4-N-acetylgalactosamine.
      [0075] The modified carrier protein above, wherein (a) the glycan is a Streptococcus glycan (e.g. Streptococcus pneumoniae (such as S. pneumoniae sp. 8 CPS, Streptococcus pneumoniae sp. 12F CPS, S. pneumoniae sp. 14 CPS, S. pneumoniae sp. 22A CPS, S. pneumoniae sp. 23A CPS, or S. pneumoniae sp. 33F CPS); and (b) the glycan has a S-2 to S-1 reducing end structure of Glucuronic acid-β1,4-glucose, N-acetyl-fucosamine-α1,3-N-acetyl-galactosamine, Galactose-β1,4-glucose, Rhamnose-β1,4-glucose, or Galactofuranose-β1,3-glucose.
[0076] 37. A nucleic acid molecule comprising a nucleotide sequence that encodes the modified carrier protein of any one of the above embodiments or any one of embodiments 1-36.
[0077] 38. The nucleic acid molecule of embodiment 37, wherein the nucleotide sequence is codon optimized for expression within a Neisseria, Shigella, Salmonella, Escherichia, Pseudomonas, Yersinia, Campylobacter, or Heliobacter cell.
[0078] 39. A vector comprising the nucleic acid molecule of embodiments 37 or 38 and wherein the modified carrier protein nucleotide sequence is operatively linked to a polynucleotide sequence encoding a periplasmic signal sequence.
[0079] 40. The vector of embodiment 39, further comprising a nucleic acid molecule that comprises a nucleotide sequence encoding a Neisseria meningitidis PglL (NmPglL) Oligosaccharyltransferase (OTase), Neisseria gonorrhoeae PglL (NgPglL) OTase, Neisseria lactamica 020-06 (NlPglL) OTase, Neisseria lactamica ATCC 23970 PglL (Nl_{ATCC23970}PglL) OTase, or Neisseria gonorrhoeae F62 PglL (Ng_{F62}PglL) OTase.
   [0080] In certain embodiments, the vector is an expression vector.
   [0081] In certain embodiments, the vector further comprises a nucleic acid molecule that comprises a nucleotide sequence encoding a Neisseria meningitidis PglL, Neisseria gonorrhoeae PglL, Neisseria lactamica 020-06 PglL, Neisseria lactamica ATCC 23970 PglL, Neisseria gonorrhoeae F62 PglL, Neisseria cinerea ATCC 14685 PglL, Neisseria mucosa PglL, Neisseria flavescens NRL30031/H210 PglL, Neisseria mucosa ATCC 25996 PglL, Neisseria sp. oral taxon 014 strain F0314 PglL, Neisseria arctica PglL, Neisseria shayeganii 871 PglL, Neisseria shayeganii 871 PglL, Neisseria sp. 83E34 PglL, Neisseria wadsworthii PglL, Neisseria elongata subsp. glycolytica ATCC 29315 PglL, Neisseria bacillformis ATCC BAA-1200 PglL, Neisseria sp. oral taxon 020 str. F0370 PglL, Neisseria sp. 74A18 PglL, Neisseria weaver ATCC 51223 PglL, or Neisseria macacae ATCC 33926 PglL OTase.
   [0082] In certain embodiments, the vector further comprises a nucleic acid molecule that comprises the nucleotide sequence of one of SEQ ID NOs: 8, 10, 12, 14, 16, 18, 20, 22, 24, 26, 28, 30, 32, 34, 36, 38, 40, 42, 44, 46, and 48.
   [0083] In certain embodiments, the vector further comprises a nucleic acid molecule that comprises a nucleotide sequence encoding the amino acid sequence SEQ ID NO: 9, 11, 13, 15, 17, 19, 21, 23, 25, 27, 29, 31, 33, 35, 37, 39, 41, 43, 45, 47, or 49.
[0084] 41. A gram-negative bacterial host cell comprising the vector of embodiments 39 or 40.
[0085] 42. The host cell of embodiment 41 which is a Neisseria, Salmonella, Shigella, Escherichia, Pseudomonas, or Yersinia cell.
[0086] 43. A gram-negative bacterial cell, comprising one or more nucleic acid molecules that encode
   [0087] (a) a PglL Glycan Substrate;
   [0088] (b) Glycosyltransferases capable of assembling the PglL Glycan Substrate onto a lipid carrier;
   [0089] (c) a modified carrier protein as in one of embodiments 1-36, targeted to the periplasm; and
   [0090] (d) a PglL OTase.
[0091] 44. The gram-negative bacterial cell of embodiment 43, wherein the cell comprises the one or more nucleic acid molecules in the nuclear DNA.
[0092] 45. The gram-negative bacterial cell of embodiment 43 or 44, which is a Neisseria, Salmonella, Shigella, Escherichia, Pseudomonas, or Yersinia cell.
[0093] 46 The gram-negative bacterial cell of embodiment 43, 44, or 45, wherein the PglL OTase is an endogenous PglL homologue.
[0094] 47. The gram-negative bacterial cell of embodiment 43, 44, or 45, wherein the PglL OTase is heterologous to the cell and the cell's endogenous PglL homologue is reduced as compared to control.
[0095] 48. A gram-negative bacterial cell, comprising at the periplasm:
   [0096] (a) a lipid-Carrier-Linked PglL Glycan Substrate,
   [0097] (b) a modified carrier protein as in any one of embodiments 1-36, and
   [0098] (c) a PglL OTase.
[0099] 49. The gram-negative bacterial cell of embodiment 48 which is a Neisseria, Salmonella, Shigella, Escherichia, Pseudomonas, or Yersinia cell.
   [0100] In certain embodiments, the PglL Glycan Substrate is endogenous to a Neisseria, Shigella, Salmonella, Streptococcus, Escherichia, Pseudomonas, Yersinia, Campylobacter, or Heliobacter cell.
   [0101] In certain embodiments, the PglL Glycan Substrate is an O-antigen. In certain embodiments, the O-antigen is S. sonnei O-antigen.
   [0102] In certain embodiments, the PglL Glycan Substrate has a reducing end structure of Glucose, Galactose, Galactofuranose, Rhamnose, GlcNAc, GalNAc, FucNAc, DATDH, GATDH, HexNAc, deoxy HexNAc, diNAcBac, or Pse. In further embodiments, the lipid-linked PglL Glycan Substrate has a reducing end structure of DATDH, GlcNAc, GalNAc, FucNAc, Galactose, or Glucose. In further embodiments, the lipid-linked PglL Glycan Substrate has a reducing end structure of GlcNAc, GalNAc, FucNAc, or Glucose. In further embodiments, the PglL Glycan Substrate has a S-2 to S-1 reducing end structure of Galactose-β1,4-Glucose; Glucuronic acid-β1,4-glucose; N-acetyl-fucosamine-α1,3-N-acetyl-galactosamine; Galactose-β1,4-glucose; Rhamnose-β1,4-glucose; Galactofuranose-β1,3-glucose; N-acetyl-altruronic acid-α1,3-4-amino-N-acetyl-fucosamine; or Rhamnose-β1,4-N-acetylgalactosamine. In further embodiments, the PglL Glycan Substrate is a Shigella sonnei glycan antigen e.g. S. sonnei O-antigen, a Shigella flexneri glycan antigen e.g. Shigella flexneri 2a CPS, a Shigella dysenteriae glycan antigen, a Streptococcus pneumoniae glycan antigen e.g. Streptococcus pneumoniae sp. 12F CPS, S. pneumoniae sp. 8 CPS, S. pneumoniae sp. 14 CPS, S. pneumoniae sp. 15A CPS, S. pneumoniae sp. 33F CPS, or S. pneumoniae sp. 22A CPS.
   [0103] In certain embodiments, the PglL OTase is a Neisseria meningitidis PglL, Neisseria gonorrhoeae PglL, Neisseria lactamica 020-06 PglL, Neisseria lactamica ATCC 23970 PglL, Neisseria gonorrhoeae F62 PglL, Neisseria cinerea ATCC 14685 PglL, Neisseria mucosa PglL, Neisseria flavescens NRL30031/H210 PglL, Neisseria mucosa ATCC 25996 PglL, Neisseria sp. oral taxon 014 strain F0314 PglL, Neisseria arctica PglL, Neisseria shayeganii 871 PglL, Neisseria shayeganii 871 PglL, Neisseria sp. 83E34 PglL, Neisseria wadsworthii PglL, Neisseria elongata subsp. glycolytica ATCC 29315 PglL, Neisseria bacillformis ATCC BAA-1200 PglL, Neisseria sp. oral taxon 020 str. F0370 PglL, Neisseria sp. 74A18 PglL, Neisseria weaver ATCC 51223 PglL, or Neisseria macacae ATCC 33926 PglL OTase.
   [0104] In certain embodiments, the PglL Otase is a Neisseria meningitidis PglL (NmPglL), Neisseria gonorrhoeae PglL (NgPglL), Neisseria lactamica 020-06 (NlPglL), Neisseria elongate subsp. glycolytica ATCC 29315 (NePglL), or Neisseria bacillformis ATCC BAA-1200 (NbPglL) PglL Otase.
   [0105] In certain embodiments, the PglL Otase is a Neisseria meningitidis PglL (NmPglL), Neisseria gonorrhoeae PglL (NgPglL), Neisseria lactamica 020-06 (NlPglL), Neisseria elongate subsp. glycolytica ATCC 29315 (NePglL), and Neisseria bacillformis ATCC BAA-1200 (NbPglL), Neisseria mucosa ATCC 25996 (NmuPglL), or Neisseria shayeganii 871 (SEQ ID NO: 33, NsPglL) PglL Otase.
   [0106] In certain embodiments, the PglL Otase is a Neisseria meningitidis PglL (NmPglL), Neisseria gonorrhoeae PglL (NgPglL), Neisseria lactamica 020-06 PglL (NlPglL), Neisseria lactamica ATCC 23970 PglL (Nl_{ATCC2397PglL}), or Neisseria gonorrhoeae F62 PglL (Ng_{F62PglL}) PglL Otase.
   [0107] In certain embodiments, the PglL Otase is a Neisseria meningitidis PglL (NmPglL), Neisseria gonorrhoeae PglL (NgPglL), Neisseria lactamica 020-06 PglL (NlPglL), or Neisseria gonorrhoeae F62 PglL (Ng_{F62PglL}) PglL Otase.
   [0108] In certain embodiments, the modified carrier protein has the amino acid sequence of one of SEQ ID NOs: 51, 53, and 55. In certain embodiments, the PglL Glycan Substrate has a reducing end structure of N-acetyl-fucosamine (FucNAc) and the modified carrier protein has the amino acid sequence SEQ ID NO: 51, 53, or 55. In certain embodiments, the PglL Glycan Substrate has a S-2 to S-1 reducing end structure of N-acetyl-altruronic acid-α1,3-4-amino-N-acetyl-fucosamine and the modified carrier protein has the amino acid sequence SEQ ID NO: 51, 53, or 55. In a further embodiment, the PglL Glycan Substrate is S. sonnei O-antigen. In a further embodiment, the PglL Otase is NmPglL.
   [0109] In certain embodiments, the modified carrier protein has the amino acid sequence of SEQ ID NO: 134 or 135. In certain embodiments, the PglL Glycan Substrate has a reducing end structure of GalNAc, FucNAc, or GlcNAc and the modified carrier protein has the amino acid sequence SEQ ID NO: 134 or 135. In certain embodiments, the PglL Glycan Substrate has a reducing end structure of N-acetyl-fucosamine-α1,3-N-acetyl-galactosamine; N-acetyl-altruronic acid-α1,3-4-amino-N-acetyl-fucosamine; or Rhamnose-β1,4-N-acetylgalactosamine and the modified carrier protein has the amino acid sequence SEQ ID NO: 134 or 135. In a further embodiment, the PglL Glycan Substrate is a Shigella (e.g., S. sonnei or S. flexneri) or Streptococcus (e.g., S. pneumonieae) antigen with a reducing end structure of N-acetyl-fucosamine-α1,3-N-acetyl-galactosamine; N-acetyl-altruronic acid-α1,3-4-amino-N-acetyl-fucosamine; or Rhamnose-β1,4-N-acetylgalactosamine and the modified carrier protein has the amino acid sequence SEQ ID NO: 134 or 135. In a further embodiment, the PglL Glycan Substrate is S. sonnei O-antigen, Shigella flexneri 2a CPS, or Streptococcus pneumoniae sp. 12F CPS. In a further embodiment, the PglL Otase is NmPglL.
   [0110] In a certain embodiment, the modified carrier protein has the amino acid sequence SEQ ID NO: 51, 199, 202, or 204. In a certain embodiment, the PglL Glycan Substrate has a reducing end structure of GlcNAc, GalNAc, FucNAc, or Glucose and the modified carrier protein has the amino acid sequence SEQ ID NO: 51, 199, 202, or 204. In a further embodiment, the PglL Glycan Substrate has a S-2 to S-1 reducing end structure of Galactose-β1,4-Glucose; Glucuronic acid-β1,4-glucose; N-acetyl-fucosamine-α1,3-N-acetyl-galactosamine; Rhamnose-β1,4-glucose; Galactofuranose-β1,3-glucose; N-acetyl-altruronic acid-α1,3-4-amino-N-acetyl-fucosamine; or Rhamnose-β1,4-N-acetylgalactosamine; and the modified carrier protein has the amino acid sequence SEQ ID NO: 51, 199, 202, or 204. In further embodiments, the PglL Glycan Substrate is a Shigella sonnei glycan antigen (e.g. S. sonnei O-antigen), a Shigella flexneri glycan antigen (e.g. Shigella flexneri 2a CPS), a Shigella dysenteriae glycan antigen, a Streptococcus pneumoniae glycan antigen (e.g. Streptococcus pneumoniae sp. 12F CPS, S. pneumoniae sp. 8 CPS, S. pneumoniae sp. 14 CPS, S. pneumoniae sp. 15A CPS, or S. pneumoniae sp. 33F CPS). In a further embodiment, the PglL Otase is NmPglL.
   [0111] In certain embodiments, the PglL Glycan Substrate has a reducing end structure of N-acetyl-fucosamine (FucNAc), the modified carrier protein has the amino acid sequence SEQ ID NO: 51, and the PglL Otase is Neisseria meningitidis PglL (NmPglL), Neisseria gonorrhoeae PglL (NgPglL), Neisseria lactamica 020-06 (NlPglL), Neisseria elongate subsp. glycolytica ATCC 29315 (NePglL), or Neisseria bacillformis ATCC BAA-1200 (NbPglL). In further embodiments, the PglL Glycan Substrate has a S-2 to S-1 reducing end structure of N-acetyl-altruronic acid-α1,3-4-amino-N-acetyl-fucosamine, the modified carrier protein has the amino acid sequence SEQ ID NO: 51, and the PglL Otase is Neisseria meningitidis PglL (NmPglL), Neisseria gonorrhoeae PglL (NgPglL), Neisseria lactamica 020-06 (NlPglL), Neisseria elongate subsp. glycolytica ATCC 29315 (NePglL), or Neisseria bacilliformis ATCC BAA-1200 (NbPglL).
   [0112] In certain embodiments, the PglL Glycan Substrate has a reducing end structure of N-acetyl-fucosamine (FucNAc), the modified carrier protein has the amino acid sequence SEQ ID NO: 51, and the PglL Otase is Neisseria meningitidis PglL (NmPglL), Neisseria gonorrhoeae PglL (NgPglL), Neisseria lactamica 020-06 (NlPglL), Neisseria elongate subsp. glycolytica ATCC 29315 (NePglL), Neisseria bacilliformis ATCC BAA-1200 (NbPglL), Neisseria mucosa ATCC 25996 (NmuPglL), or Neisseria shayeganii 871 (SEQ ID NO: 33, NsPglL). In further embodiments, the PglL Glycan Substrate has a reducing end structure of N-acetyl-altruronic acid-α1,3-4-amino-N-acetyl-fucosamine, the modified carrier protein has the amino acid sequence SEQ ID NO: 51, and the PglL Otase is Neisseria meningitidis PglL (NmPglL), Neisseria gonorrhoeae PglL (NgPglL), Neisseria lactamica 020-06 (NlPglL), Neisseria elongate subsp. glycolytica ATCC 29315 (NePglL), Neisseria bacilliformis ATCC BAA-1200 (NbPglL), Neisseria mucosa ATCC 25996 (NmuPglL), or Neisseria shayeganii 871 (SEQ ID NO: 33, NsPglL).
   [0113] In a certain embodiment, the modified carrier protein has the amino acid sequence of one of SEQ ID NOs: 57, 59, 61, 63, 65, 67, 69, 71, 73, 75, 77, 79, 81, 83, 85, 87, 89, 91, 93, 95, 97, and 99. In a certain embodiment, the PglL Glycan Substrate has a reducing end structure of N-acetyl-fucosamine (FucNAc) and the modified carrier protein has the amino acid sequence of one of SEQ ID NOs: 57, 59, 61, 63, 65, 67, 69, 71, 73, 75, 77, 79, 81, 83, 85, 87, 89, 91, 93, 95, 97, and 99. In a certain embodiment, the PglL Glycan Substrate has a reducing end structure of N-acetyl-altruronic acid-α1,3-4-amino-N-acetyl-fucosamine and the modified carrier protein has the amino acid sequence of one of SEQ ID NOs: 57, 59, 61, 63, 65, 67, 69, 71, 73, 75, 77, 79, 81, 83, 85, 87, 89, 91, 93, 95, 97, and 99. In a further embodiment, the PglL Glycan Substrate is S. sonnei O-antigen. In a further embodiment, the PglL Otase is NmPglL.
   [0114] In a certain embodiment, the modified carrier protein has the amino acid sequence of one of SEQ ID NOs: 51, 57, 59, 61, 63, 65, 67, 69, 71, 73, 75, 77, 79, 81, 83, 85, 87, 89, 91, 93, 95, 97, 99, 101, 103, 105, 108, 109, 111, 113, 117, 121, 125, 129, 131, 133, 199, 202, and 204. In a certain embodiment, the modified carrier protein has the amino acid sequence of one of SEQ ID NOs: 51, 57, 59, 61, 63, 65, 67, 69, 71, 73, 75, 77, 79, 81, 83, 85, 87, 89, 91, 93, 95, 97, 99, 101, 103, 105, 108, 109, 111, 113, 117, 121, 125, 129, 131, 133, 199, 202, and 204 and the PglL Otase is NmPglL. In a further embodiment, the PglL Glycan Substrate has a reducing end structure of N-acetyl-fucosamine (FucNAc). In a further embodiment, the PglL Glycan Substrate has a S-2 to S-1 reducing end structure of N-acetyl-altruronic acid-α1,3-4-amino-N-acetyl-fucosamine. In a further embodiment, the PglL Glycan Substrate is S. sonnei O-antigen.
   [0115] In a certain embodiment, the modified carrier protein has the amino acid sequence of one of SEQ ID NOs: 101, 103, 105, 107, 109, and 111. In a certain embodiment, the modified carrier protein has the amino acid sequence of SEQ ID NO: 101 and the PglL Otase is NgPglL. In a further embodiment, the PglL Glycan Substrate has a reducing end structure of N-acetyl-fucosamine (FucNAc). In a further embodiment, the PglL Glycan Substrate has a S-2 to S-1 reducing end structure of N-acetyl-altruronic acid-α1,3-4-amino-N-acetyl-fucosamine. In a further embodiment, the PglL Glycan Substrate is S. sonnei O-antigen. In a certain embodiment, the modified carrier protein has the amino acid sequence of SEQ ID NO: 103 and the PglL Otase is NlPglL. In a further embodiment, the PglL Glycan Substrate has a reducing end structure of N-acetyl-fucosamine (FucNAc). In a further embodiment, the PglL Glycan Substrate has a S-2 to S-1 reducing end structure of N-acetyl-altruronic acid-α1,3-4-amino-N-acetyl-fucosamine. In a further embodiment, the PglL Glycan Substrate is S. sonnei O-antigen. In a certain embodiment, the modified carrier protein has the amino acid sequence of SEQ ID NO: 111 and the PglL Otase is NsPglL. In a further embodiment, the PglL Glycan Substrate has a reducing end structure of N-acetyl-fucosamine (FucNAc). In a further embodiment, the PglL Glycan Substrate has a S-2 to S-1 reducing end structure of N-acetyl-altruronic acid-α1,3-4-amino-N-acetyl-fucosamine. In a further embodiment, the PglL Glycan Substrate is S. sonnei O-antigen.
   [0116] In a certain embodiment, the modified carrier protein has the amino acid sequence of one of SEQ ID NOs: 101, 113, 115, 117, 121, 123, 125, 127, 129, 131, and 133. In a certain embodiment, the modified carrier protein has the amino acid sequence of one of SEQ ID NOs: 101, 113, 115, 117, 121, 123, 125, 127, 129, 131, and 133 and the PglL Otase is NgPglL. In a further embodiment, the PglL Glycan Substrate has a reducing end structure of N-acetyl-fucosamine (FucNAc). In a further embodiment, the PglL Glycan Substrate has a S-2 to S-1 reducing end structure of N-acetyl-altruronic acid-α1,3-4-amino-N-acetyl-fucosamine. In a further embodiment, the PglL Glycan Substrate is S. sonnei O-antigen.
   [0117] In a certain embodiment, the modified carrier protein has the amino acid sequence SEQ ID NO: 51 and the PglL Otase is Neisseria meningitidis PglL (NmPglL), Neisseria gonorrhoeae PglL (NgPglL), Neisseria lactamica 020-06 PglL (NlPglL), Neisseria lactamica ATCC 23970 PglL (Nl_{ATCC23970PglL}), or Neisseria gonorrhoeae F62 PglL (Ng_{F62PglL}) PglL Otase. In a further embodiment, the PglL Glycan Substrate has a reducing end structure of Glucose. In a further embodiment, the PglL Glycan Substrate has a S-2 to S-1 reducing end structure of Glucuronic acid-β1,4-glucose. In a further embodiment, the PglL Glycan Substrate is an S. pneumoniae CPS having a reducing end structure of Glucose or a S-2 to S-1 reducing end structure of Glucuronic acid-β1,4-glucose. In a further embodiment, the PglL Glycan Substrate is S. pneumoniae sp.8 CPS.
   [0118] In a certain embodiment, the modified carrier protein has the amino acid sequence SEQ ID NO: 51 and the PglL Otase is Neisseria meningitidis PglL (NmPglL), Neisseria gonorrhoeae PglL (NgPglL), Neisseria lactamica 020-06 PglL (NlPglL), or Neisseria gonorrhoeae F62 PglL (Ng_{F62PglL}) PglL Otase. In a further embodiment, the PglL Glycan Substrate has a reducing end structure of Glucose. In a further embodiment, the PglL Glycan Substrate has a S-2 to S-1 reducing end structure of Rhamnose-β1,4-glucose. In a further embodiment, the PglL Glycan Substrate is an S. pneumoniae CPS having a reducing end structure of Glucose or a S-2 to S-1 reducing end structure of Rhamnose-β1,4-glucose. In a further embodiment, the PglL Glycan Substrate is S. pneumoniae sp.22A CPS.
   [0119] In certain embodiments, the modified carrier protein has the amino acid sequence of one of SEQ ID NOs: 51, 53, 55, 57, 59, 61, 63, 65, 67, 69, 71, 73, 75, 77, 79, 81, 83, 85, 87, 89, 91, 93, 95, 97, 99, 101, 103, 105, 107, 109, 111, 113, 115, 117, 119, 121, 123, 125, 127, 129, 131, 133, 135, 199, 202, and 204.
[0120] 50. A composition, comprising:
   [0121] (a) a PglL Glycan Substrate,
   [0122] (b) a modified carrier protein as in any one of embodiments 1-36, and
   [0123] (c) a PglL OTase.
[0124] 51. A conjugate comprising the modified carrier protein of any one of embodiments 1-36 and one or more other molecules.
[0125] 52. The conjugate of embodiment 51, wherein the one or more other molecules are glycans and each is covalently attached to a serine or threonine residue of a GlycoTag.
[0126] 53. The conjugate of embodiment 52, wherein the one or more glycans is endogenous to a Neisseria, Shigella, Salmonella, Streptococcus, Escherichia, Pseudomonas, Yersinia, Campylobacter, or Heliobacter cell.
   [0127] The conjugate of embodiment 51, wherein the modified carrier protein is coupled to a Shigella glycan [e.g. a Shigella sonnei glycan (such as S. sonnei O-antigen), or e.g. a Shigella flexneri glycan (such as Shigella flexneri 2a CPS), or a Shigella dysenteriae glycan] or coupled to a Streptococcus glycan [e.g. Streptococcus pneumoniae (such as Streptococcus pneumoniae sp. 12F CPS, S. pneumoniae sp. 8 CPS, S. pneumoniae sp. 14 CPS, S. pneumoniae sp. 23A CPS, S. pneumoniae sp. 33F CPS, or S. pneumoniae sp. 22A CPS)].
[0128] 54. The conjugate of embodiment 52 or 53, wherein the one or more glycans each have a reducing end structure of Glucose, Galactose, Galactofuranose, Rhamnose, GlcNAc, GalNAc, FucNAc, DATDH, GATDH, HexNAc, deoxy HexNAc, diNAcBac, or Pse.
[0129] 55. A composition comprising the conjugate of any one of embodiments 51-54.
   [0130] In certain embodiments, the PglL OTase is a Neisseria meningitidis PglL, Neisseria gonorrhoeae PglL, Neisseria lactamica 020-06 PglL, Neisseria lactamica ATCC 23970 PglL, Neisseria gonorrhoeae F62 PglL, Neisseria cinerea ATCC 14685 PglL, Neisseria mucosa PglL, Neisseria flavescens NRL30031/H210 PglL, Neisseria mucosa ATCC 25996 PglL, Neisseria sp. oral taxon 014 strain F0314 PglL, Neisseria arctica PglL, Neisseria shayeganii 871 PglL, Neisseria shayeganii 871 PglL, Neisseria sp. 83E34 PglL, Neisseria wadsworthii PglL, Neisseria elongata subsp. glycolytica ATCC 29315 PglL, Neisseria bacilliformis ATCC BAA-1200 PglL, Neisseria sp. oral taxon 020 str. F0370 PglL, Neisseria sp. 74A18 PglL, Neisseria weaver ATCC 51223 PglL, or Neisseria macacae ATCC 33926 PglL OTase.
   [0131] In certain embodiments, the glycan is endogenous to a Neisseria, Shigella, Salmonella, Streptococcus, Escherichia, Pseudomonas, Yersinia, Campylobacter, or Heliobacter cell.
   [0132] In certain embodiments, the PglL Glycan Substrate is an O-antigen. In certain embodiments, the PglL Glycan Substrate is S. sonnei O-antigen.
   [0133] In certain embodiments, the PglL Otase is a Neisseria meningitidis PglL (NmPglL), Neisseria gonorrhoeae PglL (NgPglL), Neisseria lactamica 020-06 (NlPglL), Neisseria elongate subsp. glycolytica ATCC 29315 (NePglL), and Neisseria bacillformis ATCC BAA-1200 (NbPglL), Neisseria mucosa ATCC 25996 (NmuPglL), or Neisseria shayeganii 871 (SEQ ID NO: 33, NsPglL) PglL Otase.
   [0134] In certain embodiments, the PglL Otase is a Neisseria meningitidis PglL (NmPglL), Neisseria gonorrhoeae PglL (NgPglL), Neisseria lactamica 020-06 PglL (NlPglL), Neisseria lactamica ATCC 23970 PglL (Nl_{ATCC2397PglL}), or Neisseria gonorrhoeae F62 PglL (Ng_{F62PglL}) PglL Otase.
   [0135] In certain embodiments, the PglL Otase is a Neisseria meningitidis PglL (NmPglL), Neisseria gonorrhoeae PglL (NgPglL), Neisseria lactamica 020-06 PglL (NlPglL), or Neisseria gonorrhoeae F62 PglL (Ng_{F62PglL}) PglL Otase.
   [0136] In certain embodiments, the modified carrier protein has the amino acid sequence of one of SEQ ID NOs: 51, 53, and 55. In certain embodiments, the PglL Glycan Substrate has a reducing end structure of FucNAc and the modified carrier protein has the amino acid sequence SEQ ID NO: 51, 53, or 55. In certain embodiments, the PglL Glycan Substrate has a S-2 to S-1 reducing end structure of N-acetyl-altruronic acid-α1,3-4-amino-N-acetyl-fucosamine and the modified carrier protein has the amino acid sequence SEQ ID NO: 51, 53, or 55. In a further embodiment, the PglL Glycan Substrate is S. sonnei O-antigen. In a further embodiment, the PglL Otase is NmPglL.
   [0137] In certain embodiments, the modified carrier protein has the amino acid sequence of SEQ ID NO: 134 or 135. In certain embodiments, the PglL Glycan Substrate has a reducing end structure of GalNAc, FucNAc, or GlcNAc and the modified carrier protein has the amino acid sequence SEQ ID NO: 134 or 135. In certain embodiments, the PglL Glycan Substrate has a S-2 to S-1 reducing end structure of N-acetyl-fucosamine-α1,3-N-acetyl-galactosamine; N-acetyl-altruronic acid-α1,3-4-amino-N-acetyl-fucosamine; or Rhamnose-β1,4-N-acetylgalactosamine and the modified carrier protein has the amino acid sequence SEQ ID NO: 134 or 135. In a further embodiment, the PglL Glycan Substrate is a Shigella (e.g., S. sonnei or S. flexneri) or Streptococcus (e.g., S. pneumoniae) antigen having a S-2 to S-1 reducing end structure of N-acetyl-fucosamine-α1,3-N-acetyl-galactosamine; N-acetyl-altruronic acid-α1,3-4-amino-N-acetyl-fucosamine; or Rhamnose-β1,4-N-acetylgalactosamine and the modified carrier protein has the amino acid sequence SEQ ID NO: 134 or 135. In a further embodiment, the PglL Glycan Substrate is S. sonnei O-antigen, Shigella flexneri 2a CPS, or Streptococcus pneumoniae sp. 12F CPS. In a further embodiment, the PglL Otase is NmPglL.
   [0138] In a certain embodiment, the modified carrier protein has the amino acid sequence SEQ ID NO: 51, 199, 202, or 204. In a certain embodiment, the PglL Glycan Substrate has a reducing end structure of GlcNAc, GalNAc, FucNAc, or Glucose and the modified carrier protein has the amino acid sequence SEQ ID NO: 51, 199, 202, or 204. In a further embodiment, the PglL Glycan Substrate has a S-2 to S-1 reducing end structure of Galactose-β1,4-Glucose; Glucuronic acid-β1,4-glucose; N-acetyl-fucosamine-α1,3-N-acetyl-galactosamine; Galactose-β1,4-glucose; Rhamnose-β1,4-glucose; Galactofuranose-β1,3-glucose; N-acetyl-altruronic acid-α1,3-4-amino-N-acetyl-fucosamine; or Rhamnose-β1,4-N-acetylgalactosamine and the modified carrier protein has the amino acid sequence SEQ ID NO: 51, 199, 202, or 204. In further embodiments, the PglL Glycan Substrate is a Shigella sonnei glycan antigen (e.g. S. sonnei O-antigen), a Shigella flexneri glycan antigen (e.g. Shigella flexneri 2a CPS), a Shigella dysenteriae glycan antigen, or a Streptococcus pneumoniae glycan antigen (e.g. Streptococcus pneumoniae sp. 12F CPS, S. pneumoniae sp. 8 CPS, S. pneumoniae sp. 14 CPS, S. pneumoniae sp. 15A CPS, or S. pneumoniae sp. 33F CPS) having a S-2 to S-1 reducing end structure of Galactose-β1,4-Glucose; Glucuronic acid-β1,4-glucose; N-acetyl-fucosamine-α1,3-N-acetyl-galactosamine; Galactose-β1,4-glucose; Rhamnose-β1,4-glucose; Galactofuranose-β1,3-glucose; N-acetyl-altruronic acid-α1,3-4-amino-N-acetyl-fucosamine; or Rhamnose-β1,4-N-acetylgalactosamine and the modified carrier protein has the amino acid sequence SEQ ID NO: 51, 199, 202, or 204. In a further embodiment, the PglL Otase is NmPglL.
   [0139] In certain embodiments, the PglL Glycan Substrate has a reducing end structure of FucNAc, the modified carrier protein has the amino acid sequence SEQ ID NO: 51, and the PglL Otase is Neisseria meningitidis PglL (NmPglL), Neisseria gonorrhoeae PglL (NgPglL), Neisseria lactamica 020-06 (NlPglL), Neisseria elongate subsp. glycolytica ATCC 29315 (NePglL), or Neisseria bacilliformis ATCC BAA-1200 (NbPglL). In certain embodiments, the PglL Glycan Substrate has a S-2 to S-1 reducing end structure of N-acetyl-altruronic acid-α1,3-4-amino-N-acetyl-fucosamine, the modified carrier protein has the amino acid sequence SEQ ID NO: 51, and the PglL Otase is Neisseria meningitidis PglL (NmPglL), Neisseria gonorrhoeae PglL (NgPglL), Neisseria lactamica 020-06 (NlPglL), Neisseria elongate subsp. glycolytica ATCC 29315 (NePglL), or Neisseria bacilliformis ATCC BAA-1200 (NbPglL).
   [0140] In certain embodiments, the PglL Glycan Substrate has a reducing end structure of FucNAc, the modified carrier protein has the amino acid sequence SEQ ID NO: 51, and the PglL Otase is Neisseria meningitidis PglL (NmPglL), Neisseria gonorrhoeae PglL (NgPglL), Neisseria lactamica 020-06 (NlPglL), Neisseria elongate subsp. glycolytica ATCC 29315 (NePglL), Neisseria bacilliformis ATCC BAA-1200 (NbPglL), Neisseria mucosa ATCC 25996 (NmuPglL), or Neisseria shayeganii 871 (SEQ ID NO: 33, NsPglL). In certain embodiments, the PglL Glycan Substrate has a S-2 to S-1 reducing end structure of N-acetyl-altruronic acid-α1,3-4-amino-N-acetyl-fucosamine, the modified carrier protein has the amino acid sequence SEQ ID NO: 51, and the PglL Otase is Neisseria meningitidis PglL (NmPglL), Neisseria gonorrhoeae PglL (NgPglL), Neisseria lactamica 020-06 (NlPglL), Neisseria elongate subsp. glycolytica ATCC 29315 (NePglL), Neisseria bacilliformis ATCC BAA-1200 (NbPglL), Neisseria mucosa ATCC 25996 (NmuPglL), or Neisseria shayeganii 871 (SEQ ID NO: 33, NsPglL).
   [0141] In a certain embodiment, the modified carrier protein has the amino acid sequence of one of SEQ ID NOs: 57, 59, 61, 63, 65, 67, 69, 71, 73, 75, 77, 79, 81, 83, 85, 87, 89, 91, 93, 95, 97, and 99. In a certain embodiment, the PglL Glycan Substrate has a reducing end structure of FucNAc and the modified carrier protein has the amino acid sequence of one of SEQ ID NOs: 57, 59, 61, 63, 65, 67, 69, 71, 73, 75, 77, 79, 81, 83, 85, 87, 89, 91, 93, 95, 97, and 99. In a further embodiment, the PglL Glycan Substrate has a S-2 to S-1 reducing end of N-acetyl-altruronic acid-α1,3-4-amino-N-acetyl-fucosamine. In a further embodiment, the PglL Glycan Substrate is S. sonnei O-antigen. In a further embodiment, the PglL Otase is NmPglL.
   [0142] In a certain embodiment, the modified carrier protein has the amino acid sequence of one of SEQ ID NOs: 51, 57, 59, 61, 63, 65, 67, 69, 71, 73, 75, 77, 79, 81, 83, 85, 87, 89, 91, 93, 95, 97, 99, 100, 102, 105, 107, 109, 111, 113, 117, 121, 125, 129, 131, 133, 199, 202, and 204. In a certain embodiment, the modified carrier protein has the amino acid sequence of one of SEQ ID NOs: 51, 57, 59, 61, 63, 65, 67, 69, 71, 73, 75, 77, 79, 81, 83, 85, 87, 89, 91, 93, 95, 97, 99, 100, 102, 105, 107, 109, 111, 113, 117, 121, 125, 129, 131, 133, 199, 202, and 204 and the PglL Otase is NmPglL. In a further embodiment, the PglL Glycan Substrate has a reducing end structure of FucNAc. In a further embodiment, the PglL Glycan Substrate has a S-2 to S-1 reducing end of N-acetyl-altruronic acid-α1,3-4-amino-N-acetyl-fucosamine. In a further embodiment, the PglL Glycan Substrate is S. sonnei O-antigen.
   [0143] In a certain embodiment, the modified carrier protein has the amino acid sequence of one of SEQ ID NOs: 101, 103, 105, 107, 109, and 111. In a certain embodiment, the modified carrier protein has the amino acid sequence of SEQ ID NO: 101 and the PglL Otase is NgPglL. In a further embodiment, the PglL Glycan Substrate has a reducing end structure of FucNAc. In a further embodiment, the PglL Glycan Substrate has a S-2 to S-1 reducing end of N-acetyl-altruronic acid-α1,3-4-amino-N-acetyl-fucosamine. In a further embodiment, the PglL Glycan Substrate is S. sonnei O-antigen. In a certain embodiment, the modified carrier protein has the amino acid sequence of SEQ ID NO: 103 and the PglL Otase is NlPglL. In a further embodiment, the PglL Glycan Substrate has a reducing end structure of FucNAc. In a further embodiment, the PglL Glycan Substrate has a S-2 to S-1 reducing end of N-acetyl-altruronic acid-α1,3-4-amino-N-acetyl-fucosamine. In a further embodiment, the PglL Glycan Substrate is S. sonnei O-antigen. In a certain embodiment, the modified carrier protein has the amino acid sequence of SEQ ID NO: 111 and the PglL Otase is NsPglL. In a further embodiment, the PglL Glycan Substrate has a reducing end structure of FucNAc. In a further embodiment, the PglL Glycan Substrate has a S-2 to S-1 reducing end of N-acetyl-altruronic acid-α1,3-4-amino-N-acetyl-fucosamine. In a further embodiment, the PglL Glycan Substrate is S. sonnei O-antigen.
   [0144] In a certain embodiment, the modified carrier protein has the amino acid sequence of one of SEQ ID NOs: 101, 113, 115, 117, 121, 123, 125, 127, 129, 131, and 133. In a certain embodiment, the modified carrier protein has the amino acid sequence of one of SEQ ID NOs: 101, 113, 115, 117, 121, 123, 125, 127, 129, 131, and 133 and the PglL Otase is NgPglL. In a further embodiment, the PglL Glycan Substrate has a reducing end structure of FucNAc. In a further embodiment, the PglL Glycan Substrate has a S-2 to S-1 reducing end of N-acetyl-altruronic acid-α1,3-4-amino-N-acetyl-fucosamine. In a further embodiment, the PglL Glycan Substrate is S. sonnei O-antigen.
   [0145] In a certain embodiment, the modified carrier protein has the amino acid sequence SEQ ID NO: 51 and the PglL Otase is Neisseria meningitidis PglL (NmPglL), Neisseria gonorrhoeae PglL (NgPglL), Neisseria lactamica 020-06 PglL (NlPglL), Neisseria lactamica ATCC 23970 PglL (Nl_{ATCC23970PglL}), or Neisseria gonorrhoeae F62 PglL (Ng_{F62PglL}) PglL Otase. In a further embodiment, the PglL Glycan Substrate has a reducing end structure of Glucose. In a further embodiment, the PglL Glycan Substrate has a S-2 to S-1 reducing end of Glucuronic acid-β1,4-glucose. In a further embodiment, the PglL Glycan Substrate is a S. pneumoniae antigen with a S-2 to S-1 reducing end of Glucuronic acid-β1,4-glucose. In a further embodiment, the PglL Glycan Substrate is S. pneumoniae sp.8 CPS.
   [0146] In a certain embodiment, the modified carrier protein has the amino acid sequence SEQ ID NO: 51 and the PglL Otase is Neisseria meningitidis PglL (NmPglL), Neisseria gonorrhoeae PglL (NgPglL), Neisseria lactamica 020-06 PglL (NlPglL), or Neisseria gonorrhoeae F62 PglL (Ng_{F62PglL}) PglL Otase. In a further embodiment, the PglL Glycan Substrate has a reducing end structure of Glucose. In a further embodiment, the PglL Glycan Substrate has a S-2 to S-1 reducing end of Rhamnose-β1,4-glucose. In a further embodiment, the PglL Glycan Substrate is a S. pneumoniae antigen with a S-2 to S-1 reducing end of Rhamnose-β1,4-glucose. In a further embodiment, the PglL Glycan Substrate is S. pneumoniae sp.22A CPS.
   [0147] In certain embodiments, the modified carrier protein has the amino acid sequence of one of SEQ ID NOs: 51, 53, 55, 57, 59, 61, 63, 65, 67, 69, 71, 73, 75, 77, 79, 81, 83, 85, 87, 89, 91, 93, 95, 97, 99, 101, 103, 105, 107, 109, 111, 113, 115, 117, 119, 121, 123, 125, 127, 129, 131, 133, 135, 199, 202, and 204.
[0148] 56. A method of producing an O-glycosylated modified carrier protein, comprising culturing a gram-negative bacterial host cell, wherein the gram-negative bacterial host cell:
   [0149] (a) produces a Lipid-Carrier-Linked PglL Glycan,
   [0150] (b) expresses a nucleotide sequence encoding a modified carrier protein as in any one of embodiments 1-36, operatively linked to a polynucleotide sequence encoding a periplasmic signal sequence, and
   [0151] (c) expresses a nucleotide sequence encoding a PglL OTase,
   [0152] thereby producing an O-glycosylated modified carrier protein.
   [0153] A method of producing an O-glycosylated modified carrier protein, comprising culturing a gram-negative bacterial host cell, wherein the gram-negative bacterial host cell:
      [0154] (a) expresses a nucleotide sequence encoding a PglL Glycan;
      [0155] (b) expresses one or more nucleotide sequence(s) encoding Glycosyltransferases capable of assembling a Lipid-Carrier-Linked PglL Glycan;
      [0156] (c) expresses a nucleotide sequence encoding a modified carrier protein as in any one of embodiments 1-36, operatively linked to a polynucleotide sequence encoding a periplasmic signal sequence, and
      [0157] (d) expresses a nucleotide sequence encoding a PglL OTase,
   [0158] thereby producing an O-glycosylated modified carrier protein.
[0159] 57. The method of embodiment 56, wherein the PglL Glycan is essentially the same as a glycan endogenous to a Neisseria, Shigella, Salmonella, Streptococcus, Escherichia, Pseudomonas, Yersinia, Campylobacter, or Heliobacter cell.
[0160] 58. The method of embodiment 56 or 57, wherein the PglL Glycan is characterized by having a Glucose, Galactose, Galactofuranose, Rhamnose, GlcNAc, GalNAc, FucNAc, DATDH, GATDH, HexNAc, deoxy HexNAc, diNAcBac, or Pse at the reducing end.
[0161] 59. The method of embodiment 56, 57, or 58, wherein the PglL Glycan is endogenous to the host cell.
[0162] 60. The method of embodiment 56, 57, 58, or 59, further comprising isolating the O-glycosylated modified carrier protein from the cell.
[0163] 61. A composition comprising the O-glycosylated modified carrier protein produced by the method of one of embodiments 56-60.
   [0164] In certain embodiments, the PglL OTase is a Neisseria meningitidis PglL, Neisseria gonorrhoeae PglL, Neisseria lactamica 020-06 PglL, Neisseria lactamica ATCC 23970 PglL, Neisseria gonorrhoeae F62 PglL, Neisseria cinerea ATCC 14685 PglL, Neisseria mucosa PglL, Neisseria flavescens NRL30031/H210 PglL, Neisseria mucosa ATCC 25996 PglL, Neisseria sp. oral taxon 014 strain F0314 PglL, Neisseria arctica PglL, Neisseria shayeganii 871 PglL, Neisseria shayeganii 871 PglL, Neisseria sp. 83E34 PglL, Neisseria wadsworthii PglL, Neisseria elongata subsp. glycolytica ATCC 29315 PglL, Neisseria bacilliformis ATCC BAA-1200 PglL, Neisseria sp. oral taxon 020 str. F0370 PglL, Neisseria sp. 74A18 PglL, Neisseria weaver ATCC 51223 PglL, or Neisseria macacae ATCC 33926 PglL OTase.
   [0165] In certain embodiments, the Lipid-Carrier-Linked PglL Glycan is an O-antigen. In certain embodiments, the O-antigen is S. sonnei O-antigen.
   [0166] In certain embodiments, the PglL Otase is a Neisseria meningitidis PglL (NmPglL), Neisseria gonorrhoeae PglL (NgPglL), Neisseria lactamica 020-06 (NlPglL), Neisseria elongate subsp. glycolytica ATCC 29315 (NePglL), and Neisseria bacillformis ATCC BAA-1200 (NbPglL), Neisseria mucosa ATCC 25996 (NmuPglL), or Neisseria shayeganii 871 (SEQ ID NO: 33, NsPglL) PglL Otase.
   [0167] In certain embodiments, the PglL Otase is a Neisseria meningitidis PglL (NmPglL), Neisseria gonorrhoeae PglL (NgPglL), Neisseria lactamica 020-06 PglL (NlPglL), Neisseria lactamica ATCC 23970 PglL (Nl_{ATCC2397PglL}), or Neisseria gonorrhoeae F62 PglL (Ng_{F62PglL}) PglL Otase.
   [0168] In certain embodiments, the PglL Otase is a Neisseria meningitidis PglL (NmPglL), Neisseria gonorrhoeae PglL (NgPglL), Neisseria lactamica 020-06 PglL (NlPglL), or Neisseria gonorrhoeae F62 PglL (Ng_{F62PglL}) PglL Otase.
   [0169] In certain embodiments, the modified carrier protein has the amino acid sequence of one of SEQ ID NOs: 51, 53, and 55. In certain embodiments, the PglL Glycan Substrate has a reducing end structure of FucNAc and the modified carrier protein has the amino acid sequence SEQ ID NO: 51, 53, or 55. In certain embodiments, the PglL Glycan Substrate has a S-2 to S-1 reducing end structure of N-acetyl-altruronic acid-α1,3-4-amino-N-acetyl-fucosamine and the modified carrier protein has the amino acid sequence SEQ ID NO: 51, 53, or 55. In a further embodiment, the PglL Glycan Substrate is S. sonnei O-antigen. In a further embodiment, the PglL Otase is NmPglL.
   [0170] In certain embodiments, the modified carrier protein has the amino acid sequence of SEQ ID NO: 134 or 135. In certain embodiments, the PglL Glycan Substrate has a reducing end structure of GalNAc, FucNAc, or GlcNAc and the modified carrier protein has the amino acid sequence SEQ ID NO: 134 or 135. In certain embodiments, the PglL Glycan Substrate has a reducing end structure of N-acetyl-fucosamine-α1,3-N-acetyl-galactosamine; N-acetyl-altruronic acid-α1,3-4-amino-N-acetyl-fucosamine; or Rhamnose-β1,4-N-acetylgalactosamine. In a further embodiment, the PglL Glycan Substrate is a Shigella (e.g., S. sonnei or Shigella flexneri) or Streptococcus (e.g., S. pneumoniae) antigen with a reducing end structure of N-acetyl-fucosamine-α1,3-N-acetyl-galactosamine; N-acetyl-altruronic acid-α1,3-4-amino-N-acetyl-fucosamine; or Rhamnose-β1,4-N-acetylgalactosamine. In a further embodiment, the PglL Glycan Substrate is S. sonnei O-antigen, Shigella flexneri 2a CPS, or Streptococcus pneumoniae sp. 12F CPS. In a further embodiment, the PglL Otase is NmPglL.
   [0171] In a certain embodiment, the modified carrier protein has the amino acid sequence SEQ ID NO: 51, 199, 202, or 204. In a certain embodiment, the PglL Glycan Substrate has a reducing end structure of GlcNAc, GalNAc, FucNAc, or Glucose and the modified carrier protein has the amino acid sequence SEQ ID NO: 51, 199, 202, or 204. In a certain embodiment, the PglL Glycan Substrate has a reducing end structure of Galactose-β1,4-glucose; Glucuronic acid-β1,4-glucose; N-acetyl-fucosamine-α1,3-N-acetyl-galactosamine; Rhamnose-β1,4-glucose; Galactofuranose-β1,3-glucose; N-acetyl-altruronic acid-α1,3-4-amino-N-acetyl-fucosamine; or Rhamnose-β1,4-N-acetylgalactosamine; and the modified carrier protein has the amino acid sequence SEQ ID NO: 51, 199, 202, or 204. In further embodiments, the PglL Glycan Substrate is a Shigella sonnei glycan antigen (e.g. S. sonnei O-antigen), a Shigella flexneri glycan antigen (e.g. Shigella flexneri 2a CPS), a Shigella dysenteriae glycan antigen, a Streptococcus pneumoniae glycan antigen (e.g. Streptococcus pneumoniae sp. 12F CPS, S. pneumoniae sp. 8 CPS, S. pneumoniae sp. 14 CPS, S. pneumoniae sp. 15A CPS, or S. pneumoniae sp. 33F CPS) with a reducing end structure of Galactose-β1,4-glucose; Glucuronic acid-β1,4-glucose; N-acetyl-fucosamine-α1,3-N-acetyl-galactosamine; Rhamnose-β1,4-glucose; Galactofuranose-β1,3-glucose; N-acetyl-altruronic acid-α1,3-4-amino-N-acetyl-fucosamine; or Rhamnose-β1,4-N-acetylgalactosamine; and the modified carrier protein has the amino acid sequence SEQ ID NO: 51, 199, 202, or 204. In a further embodiment, the PglL Otase is NmPglL.
   [0172] In certain embodiments, the PglL Glycan Substrate has a reducing end structure of FucNAc, the modified carrier protein has the amino acid sequence SEQ ID NO: 51, and the PglL Otase is Neisseria meningitidis PglL (NmPglL), Neisseria gonorrhoeae PglL (NgPglL), Neisseria lactamica 020-06 (NlPglL), Neisseria elongate subsp. glycolytica ATCC 29315 (NePglL), or Neisseria bacilliformis ATCC BAA-1200 (NbPglL). In certain embodiments, the PglL Glycan Substrate has a reducing end structure of N-acetyl-altruronic acid-α1,3-4-amino-N-acetyl-fucosamine, the modified carrier protein has the amino acid sequence SEQ ID NO: 51, and the PglL Otase is Neisseria meningitidis PglL (NmPglL), Neisseria gonorrhoeae PglL (NgPglL), Neisseria lactamica 020-06 (NlPglL), Neisseria elongate subsp. glycolytica ATCC 29315 (NePglL), or Neisseria bacilliformis ATCC BAA-1200 (NbPglL).
   [0173] In certain embodiments, the PglL Glycan Substrate has a reducing end structure of FucNAc, the modified carrier protein has the amino acid sequence SEQ ID NO: 51, and the PglL Otase is Neisseria meningitidis PglL (NmPglL), Neisseria gonorrhoeae PglL (NgPglL), Neisseria lactamica 020-06 (NlPglL), Neisseria elongate subsp. glycolytica ATCC 29315 (NePglL), Neisseria bacilliformis ATCC BAA-1200 (NbPglL), Neisseria mucosa ATCC 25996 (NmuPglL), or Neisseria shayeganii 871 (SEQ ID NO: 33, NsPglL). In certain embodiments, the PglL Glycan Substrate has a reducing end structure of N-acetyl-altruronic acid-α1,3-4-amino-N-acetyl-fucosamine, the modified carrier protein has the amino acid sequence SEQ ID NO: 51, and the PglL Otase is Neisseria meningitidis PglL (NmPglL), Neisseria gonorrhoeae PglL (NgPglL), Neisseria lactamica 020-06 (NlPglL), Neisseria elongate subsp. glycolytica ATCC 29315 (NePglL), Neisseria bacilliformis ATCC BAA-1200 (NbPglL), Neisseria mucosa ATCC 25996 (NmuPglL), or Neisseria shayeganii 871 (SEQ ID NO: 33, NsPglL).
   [0174] In a certain embodiment, the modified carrier protein has the amino acid sequence of one of SEQ ID NOs: 57, 59, 61, 63, 65, 67, 69, 71, 73, 75, 77, 79, 81, 83, 85, 87, 89, 91, 93, 95, 97, and 99. In a certain embodiment, the PglL Glycan Substrate has a reducing end structure of FucNAc and the modified carrier protein has the amino acid sequence of one of SEQ ID NOs: 57, 59, 61, 63, 65, 67, 69, 71, 73, 75, 77, 79, 81, 83, 85, 87, 89, 91, 93, 95, 97, and 99. In a certain embodiment, the PglL Glycan Substrate has a reducing end structure of N-acetyl-altruronic acid-α1,3-4-amino-N-acetyl-fucosamine and the modified carrier protein has the amino acid sequence of one of SEQ ID NOs: 57, 59, 61, 63, 65, 67, 69, 71, 73, 75, 77, 79, 81, 83, 85, 87, 89, 91, 93, 95, 97, and 99. In a further embodiment, the PglL Glycan Substrate is S. sonnei O-antigen. In a further embodiment, the PglL Otase is NmPglL.
   [0175] In a certain embodiment, the modified carrier protein has the amino acid sequence of one of SEQ ID NOs: 51, 57, 59, 61, 63, 65, 67, 69, 71, 73, 75, 77, 79, 81, 83, 85, 87, 89, 91, 93, 95, 97, 99, 100, 102, 105, 107, 109, 111, 113, 117, 121, 125, 129, 131, 133, 199, 202, and 204. In a certain embodiment, the modified carrier protein has the amino acid sequence of one of SEQ ID NOs: 51, 57, 59, 61, 63, 65, 67, 69, 71, 73, 75, 77, 79, 81, 83, 85, 87, 89, 91, 93, 95, 97, 99, 100, 102, 105, 107, 109, 111, 113, 117, 121, 125, 129, 131, 133, 199, 202, and 204 and the PglL Otase is NmPglL. In a further embodiment, the PglL Glycan Substrate has a reducing end structure of FucNAc. In a further embodiment, the PglL Glycan Substrate has a reducing end structure of N-acetyl-altruronic acid-α1,3-4-amino-N-acetyl-fucosamine. In a further embodiment, the PglL Glycan Substrate is S. sonnei O-antigen.
   [0176] In a certain embodiment, the modified carrier protein has the amino acid sequence of one of SEQ ID NOs: 101, 103, 105, 107, 109, and 111. In a certain embodiment, the modified carrier protein has the amino acid sequence of SEQ ID NO: 101 and the PglL Otase is NgPglL. In a further embodiment, the PglL Glycan Substrate has a reducing end structure of FucNAc. In a further embodiment, the PglL Glycan Substrate has a reducing end structure of N-acetyl-altruronic acid-α1,3-4-amino-N-acetyl-fucosamine. In a further embodiment, the PglL Glycan Substrate is S. sonnei O-antigen. In a certain embodiment, the modified carrier protein has the amino acid sequence of SEQ ID NO: 103 and the PglL Otase is NlPglL. In a further embodiment, the PglL Glycan Substrate has a reducing end structure of FucNAc. In a further embodiment, the PglL Glycan Substrate has a reducing end structure of N-acetyl-altruronic acid-α1,3-4-amino-N-acetyl-fucosamine. In a further embodiment, the PglL Glycan Substrate is S. sonnei O-antigen. In a certain embodiment, the modified carrier protein has the amino acid sequence of SEQ ID NO: 111 and the PglL Otase is NsPglL. In a further embodiment, the PglL Glycan Substrate has a reducing end structure of FucNAc. In a further embodiment, the PglL Glycan Substrate has a S-2 to S-1 reducing end structure of N-acetyl-altruronic acid-α1,3-4-amino-N-acetyl-fucosamine. In a further embodiment, the PglL Glycan Substrate is S. sonnei O-antigen.
   [0177] In a certain embodiment, the modified carrier protein has the amino acid sequence of one of SEQ ID NOs: 101, 113, 115, 117, 119, 121, 123, 125, 127, 129, 131, and 133. In a certain embodiment, the modified carrier protein has the amino acid sequence of one of SEQ ID NOs: 101, 113, 115, 117, 119, 121, 123, 125, 127, 129, 131, and 133 and the PglL Otase is NgPglL. In a further embodiment, the PglL Glycan Substrate has a reducing end structure of FucNAc. In a further embodiment, the PglL Glycan Substrate has a reducing end structure of N-acetyl-altruronic acid-α1,3-4-amino-N-acetyl-fucosamine. In a further embodiment, the PglL Glycan Substrate is S. sonnei O-antigen.
   [0178] In a certain embodiment, the modified carrier protein has the amino acid sequence SEQ ID NO: 51 and the PglL Otase is Neisseria meningitidis PglL (NmPglL), Neisseria gonorrhoeae PglL (NgPglL), Neisseria lactamica 020-06 PglL (NlPglL), Neisseria lactamica ATCC 23970 PglL (Nl_{ATCC23970PglL}), or Neisseria gonorrhoeae F62 PglL (Ng_{F62PglL}) PglL Otase. In a further embodiment, the PglL Glycan Substrate has a reducing end structure of Glucose. In a further embodiment, the PglL Glycan Substrate has a reducing end structure of Glucuronic acid-β1,4-glucose. In a further embodiment, the PglL Glycan Substrate is a Streptococcus (e.g., S. pneumoniae) antigen with a reducing end structure of glucose (e.g., Glucuronic acid-β1,4-glucose). In a further embodiment, the PglL Glycan Substrate is S. pneumoniae sp.8 CPS.
   [0179] In a certain embodiment, the modified carrier protein has the amino acid sequence SEQ ID NO: 51 and the PglL Otase is Neisseria meningitidis PglL (NmPglL), Neisseria gonorrhoeae PglL (NgPglL), Neisseria lactamica 020-06 PglL (NlPglL), or Neisseria gonorrhoeae F62 PglL (Ng_{F62PglL}) PglL Otase. In a further embodiment, the PglL Glycan Substrate has a reducing end structure of Glucose. In a further embodiment, the PglL Glycan Substrate has a reducing end structure of Rhamnose-β1,4-glucose. In a further embodiment, the PglL Glycan Substrate is a Streptococcus (e.g., S. pneumoniae) antigen with a reducing end structure of Glucose (e.g., Rhamnose-β1,4-glucose). In a further embodiment, the PglL Glycan Substrate is S. pneumoniae sp.22A CPS.
   [0180] In certain embodiments, the modified carrier protein has the amino acid sequence of one of SEQ ID NOs: 51, 53, 55, 57, 59, 61, 63, 65, 67, 69, 71, 73, 75, 77, 79, 81, 83, 85, 87, 89, 91, 93, 95, 97, 99, 101, 103, 105, 107, 109, 111, 113, 115, 117, 119, 121, 123, 125, 127, 129, 131, 133, 135, 199, 202, and 204.
[0181] 62. A method of producing an O-glycosylated modified carrier protein, comprising culturing a gram-negative bacterial host cell, wherein the gram-negative bacterial host cell:
   [0182] (a) comprises lipid-Carrier-Linked PglL Glycan Substrate,
   [0183] (b) comprises in the periplasm a modified carrier protein,
      [0184] the modified carrier protein being characterized by a carrier protein comprising at least one NgGlycoTag, NlGlycoTag, or NsGlycoTag, and
   [0185] (c) comprises a Neisseria PglL OTase.
[0186] 63. The method of embodiment 62, wherein the Lipid-Carrier-Linked PglL Glycan Substrate comprises at the reducing end a Glucose, Galactose, Galactofuranose, Rhamnose, GlcNAc, GalNAc, FucNAc, DATDH, GATDH, HexNAc, deoxy HexNAc, diNAcBac, or Pse.
[0187] 64. The method of embodiment 62 or 63, wherein the Lipid-Carrier-Linked PglL Glycan Substrate is endogenous to the host cell.
[0188] 65. The method of one of embodiments 62-64, further comprising isolating an O-glycosylated modified carrier protein from the cell.
   [0189] In certain embodiments, the method comprises isolated an O-glycosylated modified carrier protein from the periplasm of the cell.
   [0190] In certain embodiments, the PglL OTase is a Neisseria meningitidis PglL, Neisseria gonorrhoeae PglL, Neisseria lactamica 020-06 PglL, Neisseria lactamica ATCC 23970 PglL, Neisseria gonorrhoeae F62 PglL, Neisseria cinerea ATCC 14685 PglL, Neisseria mucosa PglL, Neisseria flavescens NRL30031/H210 PglL, Neisseria mucosa ATCC 25996 PglL, Neisseria sp. oral taxon 014 strain F0314 PglL, Neisseria arctica PglL, Neisseria shayeganii 871 PglL, Neisseria shayeganii 871 PglL, Neisseria sp. 83E34 PglL, Neisseria wadsworthii PglL, Neisseria elongata subsp. glycolytica ATCC 29315 PglL, Neisseria bacilliformis ATCC BAA-1200 PglL, Neisseria sp. oral taxon 020 str. F0370 PglL, Neisseria sp. 74A18 PglL, Neisseria weaver ATCC 51223 PglL, or Neisseria macacae ATCC 33926 PglL OTase.
   [0191] In certain embodiments, the glycan is an O-antigen. In certain embodiments, the O-antigen is S. sonnei O-antigen.
   [0192] In certain embodiments, the PglL Otase is a Neisseria meningitidis PglL (NmPglL), Neisseria gonorrhoeae PglL (NgPglL), Neisseria lactamica 020-06 (NlPglL), Neisseria elongate subsp. glycolytica ATCC 29315 (NePglL), and Neisseria bacilliformis ATCC BAA-1200 (NbPglL), Neisseria mucosa ATCC 25996 (NmuPglL), or Neisseria shayeganii 871 (SEQ ID NO: 33, NsPglL) PglL Otase.
   [0193] In certain embodiments, the PglL Otase is a Neisseria meningitidis PglL (NmPglL), Neisseria gonorrhoeae PglL (NgPglL), Neisseria lactamica 020-06 PglL (NlPglL), Neisseria lactamica ATCC 23970 PglL (Nl_{ATCC23970PglL}), or Neisseria gonorrhoeae F62 PglL (Ng_{F62PglL}) PglL Otase.
   [0194] In certain embodiments, the PglL Otase is a Neisseria meningitidis PglL (NmPglL), Neisseria gonorrhoeae PglL (NgPglL), Neisseria lactamica 020-06 PglL (NlPglL), or Neisseria gonorrhoeae F62 PglL (Ng_{F62PglL}) PglL Otase.
   [0195] In certain embodiments, the modified carrier protein has the amino acid sequence of one of SEQ ID NOs: 51, 53, and 55. In certain embodiments, the PglL Glycan Substrate has a reducing end structure of FucNAc and the modified carrier protein has the amino acid sequence SEQ ID NO: 51, 53, or 55. In certain embodiments, the PglL Glycan Substrate has a S-2 to S-1 reducing end structure of N-acetyl-altruronic acid-α1,3-4-amino-N-acetyl-fucosamine. In a further embodiment, the PglL Glycan Substrate is S. sonnei O-antigen. In a further embodiment, the PglL Otase is NmPglL.
   [0196] In certain embodiments, the modified carrier protein has the amino acid sequence of SEQ ID NO: 134 or 135. In certain embodiments, the PglL Glycan Substrate has a reducing end structure of GalNAc, FucNAc, or GlcNAc and the modified carrier protein has the amino acid sequence SEQ ID NO: 134 or 135. In certain embodiments, the PglL Glycan Substrate has a reducing end structure of N-acetyl-fucosamine-α1,3-N-acetyl-galactosamine; N-acetyl-altruronic acid-α1,3-4-amino-N-acetyl-fucosamine; or Rhamnose-β1,4-N-acetylgalactosamine. In a further embodiment, the PglL Glycan Substrate is a Shigella or Streptococcus antigen with a reducing end structure of N-acetyl-fucosamine-α1,3-N-acetyl-galactosamine; N-acetyl-altruronic acid-α1,3-4-amino-N-acetyl-fucosamine; or Rhamnose-β1,4-N-acetylgalactosamine. In a further embodiment, the PglL Glycan Substrate is S. sonnei O-antigen, Shigella flexneri 2a CPS, or Streptococcus pneumoniae sp. 12F CPS. In a further embodiment, the PglL Otase is NmPglL.
   [0197] In a certain embodiment, the modified carrier protein has the amino acid sequence SEQ ID NO: 51, 199, 202, or 204. In a certain embodiment, the PglL Glycan Substrate has a reducing end structure of GlcNAc, GalNAc, FucNAc, or Glucose and the modified carrier protein has the amino acid sequence SEQ ID NO: 51, 199, 202, or 204. In a certain embodiment, the PglL Glycan Substrate has a S-2 to S-1 reducing end structure of Galactose-β1,4-glucose; Glucuronic acid-β1,4-glucose; N-acetyl-fucosamine-α1,3-N-acetyl-galactosamine; Rhamnose-β1,4-glucose; Galactofuranose-β1,3-glucose; N-acetyl-altruronic acid-α1,3-4-amino-N-acetyl-fucosamine; or Rhamnose-β1,4-N-acetylgalactosamine; and the modified carrier protein has the amino acid sequence SEQ ID NO: 51, 199, 202, or 204. In further embodiments, the PglL Glycan Substrate is a Shigella or Streptococcus antigen with a a S-2 to S-1 reducing end structure of Galactose-β1,4-glucose; Glucuronic acid-β1,4-glucose; N-acetyl-fucosamine-α1,3-N-acetyl-galactosamine; Rhamnose-β1,4-glucose; Galactofuranose-β1,3-glucose; N-acetyl-altruronic acid-α1,3-4-amino-N-acetyl-fucosamine; or Rhamnose-β1,4-N-acetylgalactosamine; and the modified carrier protein has the amino acid sequence SEQ ID NO: 51, 199, 202, or 204. In further embodiments, the PglL Glycan Substrate is a Shigella sonnei glycan antigen (e.g. S. sonnei O-antigen), a Shigella flexneri glycan antigen (e.g. Shigella flexneri 2a CPS), a Shigella dysenteriae glycan antigen, a Streptococcus pneumoniae glycan antigen (e.g. Streptococcus pneumoniae sp. 12F CPS, S. pneumoniae sp. 8 CPS, S. pneumoniae sp. 14 CPS, S. pneumoniae sp. 15A CPS, or S. pneumoniae sp. 33F CPS). In a further embodiment, the PglL Otase is NmPglL.
   [0198] In certain embodiments, the PglL Glycan Substrate has a reducing end structure of FucNAc, the modified carrier protein has the amino acid sequence SEQ ID NO: 51, and the PglL Otase is Neisseria meningitidis PglL (NmPglL), Neisseria gonorrhoeae PglL (NgPglL), Neisseria lactamica 020-06 (NlPglL), Neisseria elongate subsp. glycolytica ATCC 29315 (NePglL), or Neisseria bacilliformis ATCC BAA-1200 (NbPglL). In a further embodiment, the PglL Glycan Substrate has an S-2 to S-1 reducing end structure of N-acetyl-altruronic acid-α1,3-4-amino-N-acetyl-fucosamine.
   [0199] In certain embodiments, the PglL Glycan Substrate has a reducing end structure of FucNAc, the modified carrier protein has the amino acid sequence SEQ ID NO: 51, and the PglL Otase is Neisseria meningitidis PglL (NmPglL), Neisseria gonorrhoeae PglL (NgPglL), Neisseria lactamica 020-06 (NlPglL), Neisseria elongate subsp. glycolytica ATCC 29315 (NePglL), Neisseria bacilliformis ATCC BAA-1200 (NbPglL), Neisseria mucosa ATCC 25996 (NmuPglL), or Neisseria shayeganii 871 (SEQ ID NO: 33, NsPglL). In a further embodiment, the PglL Glycan Substrate has an S-2 to S-1 reducing end structure of N-acetyl-altruronic acid-α1,3-4-amino-N-acetyl-fucosamine.
   [0200] In a certain embodiment, the modified carrier protein has the amino acid sequence of one of SEQ ID NOs: 57, 59, 61, 63, 65, 67, 69, 71, 73, 75, 77, 79, 81, 83, 85, 87, 89, 91, 93, 95, 97, and 99. In a certain embodiment, the PglL Glycan Substrate has a reducing end structure of FucNAc and the modified carrier protein has the amino acid sequence of one of SEQ ID NOs: 57, 59, 61, 63, 65, 67, 69, 71, 73, 75, 77, 79, 81, 83, 85, 87, 89, 91, 93, 95, 97, and 99. In a further embodiment, the PglL Glycan Substrate has an S-2 to S-1 reducing end structure of N-acetyl-altruronic acid-α1,3-4-amino-N-acetyl-fucosamine. In a further embodiment, the PglL Glycan Substrate is S. sonnei O-antigen. In a further embodiment, the PglL Otase is NmPglL.
   [0201] In a certain embodiment, the modified carrier protein has the amino acid sequence of one of SEQ ID NOs: 51, 57, 59, 61, 63, 65, 67, 69, 71, 73, 75, 77, 79, 81, 83, 85, 87, 89, 91, 93, 95, 97, 99, 101, 103, 105, 107, 109, 111, 113, 117, 121, 125, 129, 131, 133, 199, 202, and 204. In a certain embodiment, the modified carrier protein has the amino acid sequence of one of SEQ ID NOs: 51, 57, 59, 61, 63, 65, 67, 69, 71, 73, 75, 77, 79, 81, 83, 85, 87, 89, 91, 93, 95, 97, 99, 101, 103, 105, 107, 109, 111, 113, 117, 121, 125, 129, 131, 133, 199, 202, and 204 and the PglL Otase is NmPglL. In a further embodiment, the PglL Glycan Substrate has a reducing end structure of FucNAc. In a further embodiment, the PglL Glycan Substrate has a reducing end structure of N-acetyl-altruronic acid-α1,3-4-amino-N-acetyl-fucosamine. In a further embodiment, the PglL Glycan Substrate is S. sonnei O-antigen.
   [0202] In a certain embodiment, the modified carrier protein has the amino acid sequence of one of SEQ ID NOs: 101, 103, 105, 107, 109, and 111. In a certain embodiment, the modified carrier protein has the amino acid sequence of SEQ ID NO: 101 and the PglL Otase is NgPglL. In a further embodiment, the PglL Glycan Substrate has a reducing end structure of FucNAc. In a further embodiment, the PglL Glycan Substrate has a reducing end structure of N-acetyl-altruronic acid-α1,3-4-amino-N-acetyl-fucosamine. In a further embodiment, the PglL Glycan Substrate is S. sonnei O-antigen. In a certain embodiment, the modified carrier protein has the amino acid sequence of SEQ ID NO: 103 and the PglL Otase is NlPglL. In a further embodiment, the PglL Glycan Substrate has a reducing end structure of FucNAc. In a further embodiment, the PglL Glycan Substrate has a reducing end structure of N-acetyl-altruronic acid-α1,3-4-amino-N-acetyl-fucosamine. In a further embodiment, the PglL Glycan Substrate is S. sonnei O-antigen. In a certain embodiment, the modified carrier protein has the amino acid sequence of SEQ ID NO: 111 and the PglL Otase is NsPglL. In a further embodiment, the PglL Glycan Substrate has a reducing end structure of FucNAc. In a further embodiment, the PglL Glycan Substrate has a reducing end structure of N-acetyl-altruronic acid-α1,3-4-amino-N-acetyl-fucosamine. In a further embodiment, the PglL Glycan Substrate is S. sonnei O-antigen.
   [0203] In a certain embodiment, the modified carrier protein has the amino acid sequence of one of SEQ ID NOs: 101, 113, 115, 117, 121, 123, 125, 127, 129, 131, and 133. In a certain embodiment, the modified carrier protein has the amino acid sequence of one of SEQ ID NOs: 101, 113, 115, 117, 121, 123, 125, 127, 129, 131, and 133 and the PglL Otase is NgPglL. In a further embodiment, the PglL Glycan Substrate has a reducing end structure of FucNAc. In a further embodiment, the PglL Glycan Substrate has a reducing end structure of N-acetyl-altruronic acid-α1,3-4-amino-N-acetyl-fucosamine. In a further embodiment, the PglL Glycan Substrate is S. sonnei O-antigen.
   [0204] In a certain embodiment, the modified carrier protein has the amino acid sequence SEQ ID NO: 51 and the PglL Otase is Neisseria meningitidis PglL (NmPglL), Neisseria gonorrhoeae PglL (NgPglL), Neisseria lactamica 020-06 PglL (NlPglL), Neisseria lactamica ATCC 23970 PglL (Nl_{ATCC23970PglL}), or Neisseria gonorrhoeae F62 PglL (Ng_{F62PglL}) PglL Otase. In a further embodiment, the PglL Glycan Substrate has a reducing end structure of Glucose. In a further embodiment, the PglL Glycan Substrate has a reducing end structure of Glucuronic acid-β1,4-glucose. In a further embodiment, the PglL Glycan Substrate is a Streptococcus antigen with a reducing end structure of Glucose (e.g., Glucuronic acid-β1,4-glucose). In a further embodiment, the PglL Glycan Substrate is S. pneumoniae sp.8 CPS.
   [0205] In a certain embodiment, the modified carrier protein has the amino acid sequence SEQ ID NO: 51 and the PglL Otase is Neisseria meningitidis PglL (NmPglL), Neisseria gonorrhoeae PglL (NgPglL), Neisseria lactamica 020-06 PglL (NlPglL), or Neisseria gonorrhoeae F62 PglL (Ng_{F62PglL}) PglL Otase. In a further embodiment, the PglL Glycan Substrate has a reducing end structure of Glucose. In a further embodiment, the PglL Glycan Substrate has a reducing end structure of Rhamnose-β1,4-glucose. In a further embodiment, the PglL Glycan Substrate is a Streptococcus antigen with a reducing end structure of Glucose (e.g., Rhamnose-β1,4-glucose). In a further embodiment, the PglL Glycan Substrate is S. pneumoniae sp.22A CPS.
   [0206] In certain embodiments, the modified carrier protein has the amino acid sequence of one of SEQ ID NOs: 51, 53, 55, 57, 59, 61, 63, 65, 67, 69, 71, 73, 75, 77, 79, 81, 83, 85, 87, 89, 91, 93, 95, 97, 99, 101, 103, 105, 107, 109, 111, 113, 115, 117, 119, 121, 123, 125, 127, 129, 131, 133, 135, 199, 202, and 204.
[0207] 66. A method of making a conjugate, comprising contacting a PglL OTase and a PglL Glycan Substrate in the presence of a modified carrier protein as in any one of embodiments 1 to 36; thereby making the conjugate, optionally then isolating the conjugate.
[0208] 67. The method of embodiment 66 wherein the conjugate is a bioconjugate and contacting occurs in the periplasm of a gram-negative bacterial cell.
[0209] 68. A composition comprising a O-glycosylated modified carrier protein produced by the method of embodiment 66 or 67.
   [0210] In certain embodiments, the modified carrier protein is characterized by a carrier protein selected from the group consisting of cholera toxin b subunit (CTB), tetanus toxoid (TT), tetanus toxin C fragment (TTc), diphtheria toxoid (DT), CRM197, Pseudomonas aeruginosa exotoxin A (EPA), C. jejuni Acriflavine resistance protein A (CjAcrA), E. coli Acriflavine resistance protein A (EcAcrA), and Pseudomonas aeruginosa PcrV (PcrV) comprising at least one GlycoTag.
   [0211] In certain embodiments, the PglL Glycan Substrate is endogenous to a Neisseria, Shigella, Salmonella, Streptococcus, Escherichia, Pseudomonas, Yersinia, Campylobacter, or Heliobacter cell.
   [0212] In certain embodiments, the PglL Glycan Substrate is an O-antigen. In certain embodiments, the O-antigen is S. sonnei O-antigen.
   [0213] In certain embodiments, the PglL Glycan Substrate has a reducing end structure of Glucose, Galactose, Galactofuranose, Rhamnose, GlcNAc, GalNAc, FucNAc, DATDH, GATDH, HexNAc, deoxy HexNAc, diNAcBac, or Pse.
   [0214] In certain embodiments, the PglL OTase is a Neisseria meningitidis PglL, Neisseria gonorrhoeae PglL, Neisseria lactamica 020-06 PglL, Neisseria lactamica ATCC 23970 PglL, Neisseria gonorrhoeae F62 PglL, Neisseria cinerea ATCC 14685 PglL, Neisseria mucosa PglL, Neisseria flavescens NRL30031/H210 PglL, Neisseria mucosa ATCC 25996 PglL, Neisseria sp. oral taxon 014 strain F0314 PglL, Neisseria arctica PglL, Neisseria shayeganii 871 PglL, Neisseria shayeganii 871 PglL, Neisseria sp. 83E34 PglL, Neisseria wadsworthii PglL, Neisseria elongata subsp. glycolytica ATCC 29315 PglL, Neisseria bacilliformis ATCC BAA-1200 PglL, Neisseria sp. oral taxon 020 str. F0370 PglL, Neisseria sp. 74A18 PglL, Neisseria weaver ATCC 51223 PglL, or Neisseria macacae ATCC 33926 PglL OTase.
   [0215] In certain embodiments, the PglL Otase is a Neisseria meningitidis PglL (NmPglL), Neisseria gonorrhoeae PglL (NgPglL), Neisseria lactamica 020-06 (NlPglL), Neisseria elongate subsp. glycolytica ATCC 29315 (NePglL), and Neisseria bacillformis ATCC BAA-1200 (NbPglL), Neisseria mucosa ATCC 25996 (NmuPglL), or Neisseria shayeganii 871 (SEQ ID NO: 33, NsPglL) PglL Otase.
   [0216] In certain embodiments, the PglL Otase is a Neisseria meningitidis PglL (NmPglL), Neisseria gonorrhoeae PglL (NgPglL), Neisseria lactamica 020-06 PglL (NlPglL), Neisseria lactamica ATCC 23970 PglL (Nl_{ATCC23970PglL}), or Neisseria gonorrhoeae F62 PglL (Ng_{F62PglL}) PglL Otase.
   [0217] In certain embodiments, the PglL Otase is a Neisseria meningitidis PglL (NmPglL), Neisseria gonorrhoeae PglL (NgPglL), Neisseria lactamica 020-06 PglL (NlPglL), or Neisseria gonorrhoeae F62 PglL (Ng_{F62PglL}) PglL Otase.
   [0218] In certain embodiments, the modified carrier protein has the amino acid sequence of one of SEQ ID NOs: 51, 53, and 55. In certain embodiments, the PglL Glycan Substrate has a reducing end structure of FucNAc and the modified carrier protein has the amino acid sequence SEQ ID NO: 51, 53, or 55. In a further embodiment, the PglL Glycan Substrate has an S-2 to S-1 reducing end structure of N-acetyl-altruronic acid-α1,3-4-amino-N-acetyl-fucosamine. In a further embodiment, the PglL Glycan Substrate is S. sonnei O-antigen. In a further embodiment, the PglL Otase is NmPglL.
   [0219] In certain embodiments, the modified carrier protein has the amino acid sequence of SEQ ID NO: 134 or 135. In certain embodiments, the PglL Glycan Substrate has a reducing end structure of GalNAc, FucNAc, or GlcNAc and the modified carrier protein has the amino acid sequence SEQ ID NO: 134 or 135. In certain embodiments, the PglL Glycan Substrate has a reducing end structure of N-acetyl-fucosamine-α1,3-N-acetyl-galactosamine; N-acetyl-altruronic acid-α1,3-4-amino-N-acetyl-fucosamine; or Rhamnose-β1,4-N-acetylgalactosamine. In a further embodiment, the PglL Glycan Substrate is a Shigella or Streptococcus antigen. In a further embodiment, the PglL Glycan Substrate is S. sonnei O-antigen, Shigella flexneri 2a CPS, or Streptococcus pneumoniae sp. 12F CPS. In a further embodiment, the PglL Otase is NmPglL.
   [0220] In a certain embodiment, the modified carrier protein has the amino acid sequence SEQ ID NO: 51, 199, 202, or 204. In a certain embodiment, the PglL Glycan Substrate has a reducing end structure of GlcNAc, GalNAc, FucNAc, or Glucose and the modified carrier protein has the amino acid sequence SEQ ID NO: 51, 199, 202, or 204. In further embodiments, the PglL Glycan Substrate has an S-2 to S-1 reducing end structure of Galactose-β1,4-glucose; Glucuronic acid-β1,4-glucose; N-acetyl-fucosamine-α1,3-N-acetyl-galactosamine; Rhamnose-β1,4-glucose; Galactofuranose-β1,3-glucose; N-acetyl-altruronic acid-α1,3-4-amino-N-acetyl-fucosamine; or Rhamnose-β1,4-N-acetylgalactosamine. In further embodiments, the PglL Glycan Substrate is a Shigella sonnei glycan antigen e.g. S. sonnei O-antigen, a Shigella flexneri glycan antigen e.g. Shigella flexneri 2a CPS, a Shigella dysenteriae glycan antigen, a Streptococcus pneumoniae glycan antigen e.g. Streptococcus pneumoniae sp. 12F CPS, S. pneumoniae sp. 8 CPS, S. pneumoniae sp. 14 CPS, S. pneumoniae sp. 15A CPS, or S. pneumoniae sp. 33F CPS. In a further embodiment, the PglL Otase is NmPglL.
   [0221] In certain embodiments, the PglL Glycan Substrate has a reducing end structure of FucNAc, the modified carrier protein has the amino acid sequence SEQ ID NO: 51, and the PglL Otase is Neisseria meningitidis PglL (NmPglL), Neisseria gonorrhoeae PglL (NgPglL), Neisseria lactamica 020-06 (NlPglL), Neisseria elongate subsp. glycolytica ATCC 29315 (NePglL), or Neisseria bacilliformis ATCC BAA-1200 (NbPglL). In further embodiments, the PglL Glycan Substrate has an S-2 to S-1 reducing end structure of N-acetyl-altruronic acid-α1,3-4-amino-N-acetyl-fucosamine.
   [0222] In certain embodiments, the PglL Glycan Substrate has a reducing end structure of FucNAc, the modified carrier protein has the amino acid sequence SEQ ID NO: 51, and the PglL Otase is Neisseria meningitidis PglL (NmPglL), Neisseria gonorrhoeae PglL (NgPglL), Neisseria lactamica 020-06 (NlPglL), Neisseria elongate subsp. glycolytica ATCC 29315 (NePglL), Neisseria bacilliformis ATCC BAA-1200 (NbPglL), Neisseria mucosa ATCC 25996 (NmuPglL), or Neisseria shayeganii 871 (SEQ ID NO: 33, NsPglL). In further embodiments, the PglL Glycan Substrate has an S-2 to S-1 reducing end structure of N-acetyl-altruronic acid-α1,3-4-amino-N-acetyl-fucosamine.
   [0223] In a certain embodiment, the modified carrier protein has the amino acid sequence of one of SEQ ID NOs: 57, 59, 61, 63, 65, 67, 69, 71, 73, 75, 77, 79, 81, 83, 85, 87, 89, 91, 93, 95, 97, and 99. In a certain embodiment, the PglL Glycan Substrate has a reducing end structure of FucNAc and the modified carrier protein has the amino acid sequence of one of SEQ ID NOs: 57, 59, 61, 63, 65, 67, 69, 71, 73, 75, 77, 79, 81, 83, 85, 87, 89, 91, 93, 95, 97, and 99. In further embodiments, the PglL Glycan Substrate has an S-2 to S-1 reducing end structure of N-acetyl-altruronic acid-α1,3-4-amino-N-acetyl-fucosamine. In a further embodiment, the PglL Glycan Substrate is S. sonnei O-antigen. In a further embodiment, the PglL Otase is NmPglL.
   [0224] In a certain embodiment, the modified carrier protein has the amino acid sequence of one of SEQ ID NOs: 51, 57, 59, 61, 63, 65, 67, 69, 71, 73, 75, 77, 79, 81, 83, 85, 87, 89, 91, 93, 95, 97, 99, 101, 103, 105, 107, 109, 111, 113, 117, 121, 125, 129, 131, 133, 199, 202, and 204. In a certain embodiment, the modified carrier protein has the amino acid sequence of one of SEQ ID NOs: 51, 57, 59, 61, 63, 65, 67, 69, 71, 73, 75, 77, 79, 81, 83, 85, 87, 89, 91, 93, 95, 97, 99, 101, 103, 105, 107, 109, 111, 113, 117, 121, 125, 129, 131, 133, 199, 202, and 204 and the PglL Otase is NmPglL. In a further embodiment, the PglL Glycan Substrate has a reducing end structure of FucNAc. In further embodiments, the PglL Glycan Substrate has an S-2 to S-1 reducing end structure of N-acetyl-altruronic acid-α1,3-4-amino-N-acetyl-fucosamine. In a further embodiment, the PglL Glycan Substrate is S. sonnei O-antigen.
   [0225] In a certain embodiment, the modified carrier protein has the amino acid sequence of one of SEQ ID NOs: 101, 103, 105, 107, 109, and 111. In a certain embodiment, the modified carrier protein has the amino acid sequence of SEQ ID NO: 101 and the PglL Otase is NgPglL. In a further embodiment, the PglL Glycan Substrate has a reducing end structure of FucNAc. In further embodiments, the PglL Glycan Substrate has an S-2 to S-1 reducing end structure of N-acetyl-altruronic acid-α1,3-4-amino-N-acetyl-fucosamine. In a further embodiment, the PglL Glycan Substrate is S. sonnei O-antigen. In a certain embodiment, the modified carrier protein has the amino acid sequence of SEQ ID NO: 103 and the PglL Otase is NlPglL. In a further embodiment, the PglL Glycan Substrate has a reducing end structure of FucNAc. In further embodiments, the PglL Glycan Substrate has an S-2 to S-1 reducing end structure of N-acetyl-altruronic acid-α1,3-4-amino-N-acetyl-fucosamine. In a further embodiment, the PglL Glycan Substrate is S. sonnei O-antigen. In a certain embodiment, the modified carrier protein has the amino acid sequence of SEQ ID NO: 111 and the PglL Otase is NsPglL. In a further embodiment, the PglL Glycan Substrate has a reducing end structure of FucNAc. In further embodiments, the PglL Glycan Substrate has an S-2 to S-1 reducing end structure of N-acetyl-altruronic acid-α1,3-4-amino-N-acetyl-fucosamine. In a further embodiment, the PglL Glycan Substrate is S. sonnei O-antigen.
   [0226] In a certain embodiment, the modified carrier protein has the amino acid sequence of one of SEQ ID NOs: 101, 113, 115, 117, 121, 123, 125, 127, 129, 131, and 133. In a certain embodiment, the modified carrier protein has the amino acid sequence of one of SEQ ID NOs: 101, 113, 115, 117, 121, 123, 125, 127, 129, 131, and 133 and the PglL Otase is NgPglL. In a further embodiment, the PglL Glycan Substrate has a reducing end structure of FucNAc. In further embodiments, the PglL Glycan Substrate has an S-2 to S-1 reducing end structure of N-acetyl-altruronic acid-α1,3-4-amino-N-acetyl-fucosamine. In a further embodiment, the PglL Glycan Substrate is S. sonnei O-antigen.
   [0227] In a certain embodiment, the modified carrier protein has the amino acid sequence SEQ ID NO: 51 and the PglL Otase is Neisseria meningitidis PglL (NmPglL), Neisseria gonorrhoeae PglL (NgPglL), Neisseria lactamica 020-06 PglL (NlPglL), Neisseria lactamica ATCC 23970 PglL (Nl_{ATCC23970PglL}), or Neisseria gonorrhoeae F62 PglL (Ng_{F62PglL}) PglL Otase. In a further embodiment, the PglL Glycan Substrate has a reducing end structure of Glucose. In further embodiments, the PglL Glycan Substrate has an S-2 to S-1 reducing end structure of Glucuronic acid-β1,4-glucose. In a further embodiment, the PglL Glycan Substrate is a Streptococcus antigen with a reducing end structure of Glucose (e.g., an S-2 to S-1 reducing end structure of Glucuronic acid-β1,4-glucose). In a further embodiment, the PglL Glycan Substrate is S. pneumoniae sp.8 CPS.
   [0228] In a certain embodiment, the modified carrier protein has the amino acid sequence SEQ ID NO: 51 and the PglL Otase is Neisseria meningitidis PglL (NmPglL), Neisseria gonorrhoeae PglL (NgPglL), Neisseria lactamica 020-06 PglL (NlPglL), or Neisseria gonorrhoeae F62 PglL (Ng_{F62PglL}) PglL Otase. In a further embodiment, the PglL Glycan Substrate has a reducing end structure of Glucose. In further embodiments, the PglL Glycan Substrate has an S-2 to S-1 reducing end structure of Rhamnose-β1,4-glucose. In a further embodiment, the PglL Glycan Substrate is a Streptococcus antigen with a reducing end structure of Glucose (e.g., an S-2 to S-1 reducing end structure of Rhamnose-β1,4-glucose). In a further embodiment, the PglL Glycan Substrate is S. pneumoniae sp.22A CPS.
   [0229] In certain embodiments, the modified carrier protein has the amino acid sequence of one of SEQ ID NOs: 51, 53, 55, 57, 59, 61, 63, 65, 67, 69, 71, 73, 75, 77, 79, 81, 83, 85, 87, 89, 91, 93, 95, 97, 99, 101, 103, 105, 107, 109, 111, 113, 115, 117, 119, 121, 123, 125, 127, 129, 131, 133, 135, 199, 202, and 204.
[0230] 69. An immunogenic composition comprising the modified carrier protein as in any one of embodiments 1 to 36 covalently attached to one or more immunogenic glycans.
   [0231] An immunogenic composition comprising the modified carrier protein as in any one of embodiments 1 to 36 covalently attached to one or more immunogenic PglL Glycan Substrates.
   [0232] In certain embodiments, the PglL Glycan Substrate is endogenous to a Neisseria, Shigella, Salmonella, Streptococcus, Escherichia, Pseudomonas, Yersinia, Campylobacter, or Heliobacter cell.
   [0233] In certain embodiments, the PglL Glycan Substrate is an O-antigen. In certain embodiments, the O-antigen is S. sonnei O-antigen.
   [0234] In certain embodiments, the PglL Glycan Substrate has a reducing end structure of Glucose, Galactose, Galactofuranose, Rhamnose, GlcNAc, GalNAc, FucNAc, DATDH, GATDH, HexNAc, deoxy HexNAc, diNAcBac, or Pse. In further embodiments, the lipid-linked PglL Glycan Substrate has a reducing end structure of DATDH, GlcNAc, GalNAc, FucNAc, Galactose, or Glucose. In further embodiments, the lipid-linked PglL Glycan Substrate has a reducing end structure of GlcNAc, GalNAc, FucNAc, or Glucose. In further embodiments, the PglL Glycan Substrate has a S-2 to S-1 reducing end structure of Galactose-β1,4-Glucose; Glucuronic acid-β1,4-glucose; N-acetyl-fucosamine-α1,3-N-acetyl-galactosamine; Galactose-β1,4-glucose; Rhamnose-β1,4-glucose; Galactofuranose-β1,3-glucose; N-acetyl-altruronic acid-α1,3-4-amino-N-acetyl-fucosamine; or Rhamnose-β1,4-N-acetylgalactosamine. In further embodiments, the PglL Glycan Substrate is a Shigella (e.g., S. sonnei or Shigella flexneri) or Streptococcus (e.g., S. pneumoniae) antigen. In further embodiments, the PglL Glycan Substrate is S. sonnei O-antigen, Shigella flexneri 2a CPS, Streptococcus pneumoniae sp. 12F CPS, S. pneumoniae sp. 8 CPS, S. pneumoniae sp. 14 CPS, S. pneumoniae sp. 15A CPS, S. pneumoniae sp. 33F CPS, S. pneumoniae sp. 22A CPS, or S. flexneri sp. 2a CPS.
[0235] 70. A method of inducing an antibody response in a mammal, comprising administering to the mammal an immunologically effective amount of the immunogenic composition of embodiment 69.
[0236] 71. The immunogenic composition as in embodiment 69 for use in inducing an antibody response in a mammal.
   [0237] The immunogenic composition as in embodiment 69 for use in inducing an immune response in a mammal.
[0238] 72. Use of the immunogenic composition of embodiment 69 for inducing an antibody response in a mammal.
   [0239] Use of the immunogenic composition of embodiment 69 for inducing an immune response in a mammal.
[0240] 73. Use of the immunogenic composition of embodiment 69 for the manufacture of a medicament for inducing an antibody response in a mammal.
   [0241] Use of the immunogenic composition of embodiment 69 for the manufacture of a medicament for inducing an immune response in a mammal.
[0242] 74. The immunogenic composition as in embodiment 69 for use in the treatment or prevention of a disease caused by Streptococcus pneumoniae infection.
   [0243] The immunogenic composition of embodiment 74, wherein the disease caused by Streptococcus pneumoniae infection is pneumonia, invasive pneumococcal disease (IPD), exacerbations of chronic obstructive pulmonary disease (COPD), otitis media, meningitis, bacteraemia, pneumonia and/or conjunctivitis.
   [0244] The immunogenic composition as in embodiment 69 for use in inducing an immune response against a Streptococcus pneumoniae glycan in a mammal.
[0245] 75. Use of the immunogenic composition of embodiment 69 for inducing an antibody response against a Streptococcus pneumoniae glycan in a mammal.
   [0246] Use of the immunogenic composition of embodiment 69 for inducing an immune response against a Streptococcus pneumoniae glycan in a mammal.
[0247] 76. Use of the immunogenic composition of embodiment 69 for the manufacture of a medicament for inducing an antibody response against a Streptococcus pneumoniae glycan in a mammal.
   [0248] Use of the immunogenic composition of embodiment 69 for the manufacture of a medicament for inducing an immune response against a Streptococcus pneumoniae glycan in a mammal.

### BRIEF DESCRIPTION OF THE DRAWINGS/FIGURES

[0249] FIG. 1—overview of a Neisseria O-linked, oligosaccharyltransferase-mediated glycosylation pathway. Adapted from FIG. 3(b) of [2].

[0250] FIG. 2—Western blot (FIG. 2A) and Coomassie blue (FIG. 2B) results from assaying NmPglL transfer of S. sonnei O-antigen to rEPA1 (columns #1 and #4), to rEPA2 (column #2), and rEPA3 (column #3). Antibodies against His-tagged EPA were used.

[0251] FIG. 3—The stability of the rEPA1-S. sonnei O-antigen bioconjugate was studied at three different temperatures (−80° C., 2-8° C., and room temperature (RT) 20-25° C.) for a time of six months. Additionally, five freeze/thaw cycles (5 FT) on purified rEPA1-S. sonnei O-antigen were performed. FIG. 3 depicts the SEC-HPLC readouts of samples taken at zero months, two weeks, one month, three months, and six months.

[0252] FIG. 4—Western blot results (using antibodies against S. sonnei O-antigen and EPA) probing bleed sera taken at zero, twenty-one, and twenty-eight days from New Zealand White Rabbits which were subcutaneously injected at zero, seven, ten, and eighteen days with an rEPA1-S. sonnei O-antigen bioconjugate composition comprising (FIG. 4A) 2 μg of sugar, 40 μg of protein, and non-Freund's adjuvant or (FIG. 4B) 10 μg of sugar, 200 μg of protein, and non-Freund's adjuvant.

[0253] FIG. 5—Western blot results from assaying NmPglL transfer of S. sonnei O-antigen, S. flexneri 2a O-antigen, and Streptococcus pneumoniae 12F CPS onto rEPA1 or rEPA43. Anti-His antibodies towards His-tagged EPA were used.

[0254] FIG. 6—Western blot results from assaying NmPglL transfer of S. sonnei O-antigen onto mAcrA, mPcrV, mCrm197 (column “3.1”), or m2Crm197 (column “3.2”). Anti-His antibodies towards His-tagged EPA were used.

[0255] FIG. 7—Depiction of surface-exposed Pseudomonas exotoxin A (EPA) residues modified to produce rEPA4-rEPA23 (FIG. 7A) and rEPA24-rEPA25 (FIG. 7B). Residues numbered with respect to SEQ ID NO: 1, structure adapted from Protein Data Bank (PDB) ID 1IKQ.

[0256] FIG. 8—Western blot results from assaying NmPglL transfer of lipid-carrier-linked S. sonnei O-antigen to rEPA4-rEPA15, rEPA24-rEPA25 (FIG. 8A) and rEPA16-rEPA25 (FIG. 8B) in vivo. Antibodies against the histidine tag (top gels) and against S. sonnei O-antigen (bottom gels) were used.

[0257] FIG. 9—Western blot results from assaying whether NgPglL, NlPglL, NePglL, NbPglL, and NmuPglL (FIG. 9A) as well as NsPglL (FIG. 9B) transfer lipid-carrier-linked S. sonnei O-antigen to carrier proteins containing an endogenous GlycoTag (i.e., to carrier protein rEPA26-rEPA31, respectively). FIG. 9B also depicts the Western blot results of having assayed NmPglL transfer of S. sonnei O-antigen onto rEPA26-rEPA31. Antibodies against the histidine tag (top gels) and against S. sonnei O-antigen (bottom gels) were used.

[0258] FIG. 10—Western blot results from assaying NgPglL transfer of lipid-carrier-linked S. sonnei O-antigen to rEPA332-rEPA39. “N-terminal” was EPA with NgPilin GlycoTag sequence SEQ ID NO: 145 operably linked to its N-terminus. “N/C-terminal” was EPA with two copies of the NgPilin GlycoTag sequence SEQ ID NO: 145, one at its N-terminus and a second at its C-terminus. Antibodies against EPA (FIG. 10A) and against S. sonnei O-antigen (FIG. 10B) were used.

[0259] FIG. 11—Western blot and Coommassie blue staining results from assaying NmPglL transfer of lipid-carrier-linked S. sonnei O-antigen to rEPA32, rEPA34, rEPA36, rEPA38, rEPA40, rEPA41, and rEPA42 in vivo. Antibodies against EPA were used.

[0260] FIG. 12—Western blot and Coomassie blue staining results from assaying NmPglL, NgPglL (“N. gonorrhoeae 1”), NlPglL (“N. lactamica 1”), Nl_{ATCC23970PglL} (“N. lactamica 2”), and Ng_{F62}PglL (“N. gonorrhoeae 2”) transfer of Pneomococcal Sp. 8 CPS glycan onto rEPA1 (FIG. 12A). Protein Kinase (“PK”) treatment of samples abolished NmPglL, NgPglL (“N. gonorrhoeae 1”), NlPglL (“N. lactamica 1”), and Ng_{F62}PglL (“N. gonorrhoeae 2”) signals, indicating that the Pneomococcal Sp. 8 CPS glycan was linked to the rEPA protein (FIG. 12B). Antibodies against Pneomococcal Sp. 8 CPS glycan were used.

[0261] FIG. 13—Western blot and Coomassie blue staining results from assaying NmPglL, NgPglL (“N. gonorrhoeae 1”), NlPglL (“N. lactamica 1”), and Ng_{F62}PglL (“N. gonorrhoeae 2”) transfer of Pneomococcal Sp. 22A CPS glycan onto rEPA1. Protein Kinase (“+PK”) treatment of samples abolished NmPglL, NgPglL (“N. gonorrhoeae 1”), NlPglL (“N. lactamica 1”), and Ng_{F62}PglL (“N. gonorrhoeae 2”) signals, indicating that the Pneomococcal Sp. 22A CPS glycan was linked to the rEPA1 protein. Antibodies against Pneomococcal Sp. 22A CPS glycan were used.

### DETAILED DESCRIPTION OF THE INVENTION

[0262] The present invention provides modified carrier proteins incorporating one or more GlycoTag and their use for in vivo or in vitro bioconjugation.

### Definitions

[0263] To facilitate an understanding of the present invention, a number of terms and phrases are defined below. Alternate forms (tenses) of these terms and phrases are also encompassed herein. Unless otherwise noted, technical terms are used according to conventional usage. Definitions of common terms in molecular biology may be found in Benjamin Lewin, Genes V, published by Oxford University Press, 1994 (ISBN 0-19-854287-9); Kendrew et al. (eds.), The Encyclopedia of Molecular Biology, published by Blackwell Science Ltd., 1994 (ISBN 0-632-02182-9); and Robert A. Meyers (ed.), Molecular Biology and Biotechnology: a Comprehensive Desk Reference, published by VCR Publishers, Inc., 1995 (ISBN 1-56081-569-8).

[0264] “Comprise” (“comprising” or “comprises”) as used herein is open-ended and means “including, but not limited to.” “Having” is used herein as a synonym of comprising. It is understood that wherever embodiments are described herein with the language “comprising,” such embodiments encompass those described in terms of “consisting of” and/or “consisting essentially of”. “Comprises therein” or “comprising therein” means that the referenced molecule, amino acid sequence, or nucleotide sequence has incorporated within it a GlycoTag molecule, amino acid sequence or nucleotide sequence, respectively. With respect to, for example, a “carrier protein comprising therein a GlycoTag,” the nucleotide sequence encoding that carrier protein has, between the 5′ and 3′ ends, a nucleotide sequence encoding a GlycoTag, likewise the carrier protein amino acid sequence has, between the N- and C-terminus, a GlycoTag amino acid sequence.

[0265] As used in the description and the appended claims, the singular forms “a,” “an,” and “the” include plural referents unless the context clearly dictates otherwise. Thus, for example, reference to “a GlycoTag” encompasses one or more GlycoTags.

[0266] “About” or “approximately” mean roughly, around, or in the regions of. The terms “about” or “approximately” further mean within an acceptable contextual error range for the particular value as determined by one of ordinary skill in the art, which will depend in part on how the value is measured, i.e. the limitations of the measurement system or the degree of precision required for a particular purpose. When the terms “about” or “approximately” are used in conjunction with a numerical range, it modifies that range by extending the boundaries above and below the numerical values set forth. For example “between about 5.5 to 6.5 g/l” means the boundaries of the numerical range extend below 5.5 and above 6.5 so that the particular value in question achieves the same functional result as within the range. For example, “about” and “approximately” can mean within 1 or more than 1 standard deviation as per the practice in the art. Alternatively, “about” and “approximately” can mean a range of up to 20%, up to 10%, up to 5%, or up to 1% of a given value.

[0267] The term “and/or” as used in a phrase such as “A and/or B” is intended to include “A and B,” “A or B,” “A,” and “B.” Likewise, the term “and/or” as used in a phrase such as “A, B, and/or C” is intended to encompass each of the following embodiments: A, B, and C; A, B, or C; A or C; A or B; B or C; A and C; A and B; B and C; A (alone); B (alone); and C (alone).

[0268] Unless specifically stated, a process comprising a step of mixing two or more components does not require any specific order of mixing. Components can be mixed in any order. Where there are three components then two components can be combined with each other, and then the combination may be combined with the third component, etc. Similarly, while steps of a method may be numbered (such as (1), (2), (3), etc. or (i), (ii), (iii)), the numbering of the steps does not itself mean that the steps must be performed in that order (i.e., step 1 then step 2 then step 3, etc.). In certain embodiments, the word “then” is used to specify the order of a method's steps.

[0269] “Essentially the same” herein means a high degree of similarity between at least two molecules (including structure or function) or numeric values such that one of skill in the art would consider the difference to be immaterial, negligible, and/or statistically insignificant. For example, a first polypeptide, conjugate, antibody, polynucleotide, vector, cell, composition, or molecule is “essentially the same” as a second polypeptide, conjugate, antibody, polynucleotide, vector, cell, composition, or molecule herein if the first has only immaterial differences in structure and function as compared to the second. “Essentially the same” herein encompasses “the same.”

[0270] An “effective amount” means an amount sufficient to cause the referenced effect or outcome. An “effective amount” can be determined empirically and in a routine manner using known techniques in relation to the stated purpose. In certain embodiments, a composition comprises an immunologically effective amount of an antigen, adjuvant, or both. In certain embodiments, an “effective amount” in the context of administering a therapy (e.g. an immunogenic composition or vaccine of the invention) to a subject refers to the amount of a therapy which has a prophylactic and/or therapeutic effect(s). In certain embodiments, an “effective amount” refers to the amount of a therapy which is sufficient to achieve one, two, three, four, or more of the following effects: (i) reduce or ameliorate the severity of a bacterial infection or symptom associated therewith; (ii) reduce the duration of a bacterial infection or symptom associated therewith; (iii) prevent the progression of a bacterial infection or symptom associated therewith; (iv) cause regression of a bacterial infection or symptom associated therewith; (v) prevent the development or onset of a bacterial infection, or symptom associated therewith; (vi) prevent the recurrence of a bacterial infection or symptom associated therewith; (vii) reduce organ failure associated with a bacterial infection; (viii) reduce hospitalization of a subject having a bacterial infection; (ix) reduce hospitalization length of a subject having a bacterial infection; (x) increase the survival of a subject with a bacterial infection; (xi) eliminate a bacterial infection in a subject; (xii) inhibit or reduce a bacterial replication in a subject; and/or (xiii) enhance or improve the prophylactic or therapeutic effect(s) of another therapy.

[0271] “Subject” refers to an animal, in particular a mammal such as a primate (e.g. human).

[0272] “Essentially free,” as in “essentially free from” or “essentially free of,” means comprising less than a detectable level of a referenced material or comprising only unavoidable levels of a referenced material (trace amounts).

[0273] The word “substantially” does not exclude “completely” e.g. a composition which is “substantially free” from Y may be completely free from Y. “Substantially pure” refers to material which is at least 50% pure (i.e., free from contaminants), at least 90% pure, at least 95% pure, at least 98% pure, or at least 99% pure.

[0274] As is conventional, the designation “NH2” or “N-” refers to the N-terminus of an amino acid sequence and the designation “COOH” or “C-” refers to the C-terminus of an amino acid sequence.

[0275] “Internal”, “Interior” as used herein with respect to a protein, residue, or amino acid sequence means located between the N-terminus and the C-terminus.

[0276] “Fragment” is a nucleotide or polypeptide comprising “n” consecutive nucleic acids or amino acids, respectively, of the reference sequence and wherein “n” is any integer that is less than the total number of amino acids in the reference sequence. In certain embodiments, “n” is any integer between 1 and 100. In this way, a “fragment thereof” of a hypothetical 100 residue long reference sequence (SeqX) may consist of any 1 to 99 consecutive amino acids of SeqX. In certain embodiments, a fragment consists of 10, 20, 30, 40 or 50 contiguous amino acids of the full length sequence. Fragments may be readily obtained by removing “n” consecutive amino acids from either or both of the N-terminus and C-terminus of the full length reference polypeptide sequence. Fragments may be readily obtained by removing “n” consecutive nucleic acids fom either or both of the 3′ and 5′ ends of the nucleotide sequence that encodes the full length reference polypeptide sequence. An “immunogenic fragment” as used herein consists of “n” consecutive amino acids of an antigen sequence and is capable of eliciting an antibody or immune response in a mammal. Fragments of a polypeptide, for example, can be produced using techniques known in the art, e.g. recombinantly, by proteolytic digestion, or by chemical synthesis. Internal or terminal fragments of a polypeptide can be generated by removing one or more nucleic acids from the 3′ or 5′ end (for a terminal fragment) or by removing one or more nucleic acids from both 3′ and 5′ ends (for an internal fragment) of a nucleotide sequence that encodes the polypeptide's full length amino acid sequence.

[0277] “Operably linked” or “operatively linked” means linked so as to be “operational”, for example, the configuration of polynucleotide sequences for recombinant protein expression. In certain embodiments, “operably linked” refers to the art-recognized positioning of, e.g., nucleic acid components such that the intended function (e.g., expression) is achieved. A person with ordinary skill in the art will recognize that under certain circumstances (e.g., a cleavage site or purification tag), two or more components “operably linked” together are not necessarily adjacent to each other in the nucleic acid or amino acid sequence (contiguously linked). A coding sequence that is “operably linked” to a “control sequence” (e.g., a promoter, enhancer, or IRES) is ligated in such a way that expression of the coding sequence is under the influence or control of the control sequence. A person with ordinary skill in the art will recognize that a variety of configurations are functional and encompassed.

[0278] “Recombinant” means artificial or synthetic. In certain embodiments, “recombinant” indicates the referenced amino acid, polypeptide, conjugate, antibody, nucleic acid, polynucleotide, vector, cell, composition, or molecule was made by an artificial combination of two or more molecules (e.g., heterologous nucleic acid or amino acid sequences). Such artificial combination includes, without limitation, chemical synthesis and genetic engineering techniques. In certain embodiments, a “recombinant polypeptide” refers to a polypeptide that has been made using recombinant nucleic acids (nucleic acids introduced into a host cell). In certain embodiments, a recombinant nucleic acid is not heterologous (e.g., wherein the recombinant nucleic acid is a second copy of a nucleic acid innately present within a host cell). A “transgene” herein means a polynucleotide introduced into a cell, therefore a transgene is recombinant.

[0279] “Mutant” and “Modified” are given their well-understood and customary meanings and at least signify that the referenced molecule is altered (structure and/or function) as compared to control (e.g., wild type molecule or its naturally occurring counterpart) under comparable conditions or signify that the referenced numeric value is altered (increased or decreased) as compared to that of control under comparable conditions.

[0280] “Conservative” amino acid substitutions or mutations refer to the interchangeability of residues having similar side chains, and thus typically involves substitution of the amino acid in the polypeptide with amino acids within the same or similar defined class of amino acids. However, as used herein, in some embodiments, conservative mutations do not include substitutions from a hydrophilic to hydrophilic, hydrophobic to hydrophobic, hydroxyl-containing to hydroxyl-containing, or small to small residue, if the conservative mutation can instead be a substitution from an aliphatic to an aliphatic, non-polar to non-polar, polar to polar, acidic to acidic, basic to basic, aromatic to aromatic, or constrained to constrained residue. Further, as used herein, A, V, L, or I can be conservatively mutated to either another aliphatic residue or to another non-polar residue. The table below shows exemplary conservative substitutions.

| Residue | Possible Conservative Mutations |
|---|---|
| A, L, V, I | Other aliphatic (A, L, V, I) |
| | Other non-polar (A, L, V, I, G, M) |
| G, M | Other non-polar (A, L, V, I, G, M) |
| D, E | Other acidic (D, E) |
| K, R | Other basic (K, R) |
| P | none |
| N, Q, S, T | Other polar |
| H, Y, W, F | Other aromatic (H, Y, W, F) |
| C | None |

[0281] “Isolated” or “purified” herein means a polypeptide, conjugate, antibody, polynucleotide, vector, cell, composition, or molecule in a form not found in nature. This includes, for example, a polypeptide, conjugate, antibody, polynucleotide, vector, cell, composition, or molecule having been separated from host cell or organism (including crude extracts) or otherwise removed from its natural environment. In certain embodiments, an isolated or purified protein is a protein essentially free from all other polypeptides with which the protein is innately associated (or innately in contact with). For example, “isolated PglL” or “purified PglL” includes the recombinant PglL protein essentially free from other periplasmic polypeptides that the PglL protein would otherwise be associated with (in contact with) inside the host cell. For example, an “isolated O-glycosylated modified carrier protein” or “purified O-glycosylated modified carrier protein” may have been separated from un-O-glycosylated modified carrier protein (e.g., following in vitro conjugation steps). In certain embodiments, “isolated” or “purified” also means a protein is not bound to an antibody or antibody fragment. In certain embodiments, an isolated or purified protein does not include a collection of the protein's components (sub-parts). For example, wherein the protein is a complex of protein components, an “isolated/purified complex” may not include a collection of the complex's components (unbound to each other) obtained after, for example, application of sodium dodecyl sulfate (SDS) or 2-Mercaptoethanol (both of which break down the bonds between protein components in a complex).

[0282] A “Pharamaceutical-grade” or “pharmaceutically acceptable” polypeptide, conjugate, antibody, polynucleotide, vector, cell, composition, or molecule is isolated, purified, or otherwise formulated to be essentially free from impurities (e.g., essentially free from components (e.g., naturally occurring components) which are unacceptably toxic to a subject to which the polypeptide, conjugate, antibody, polynucleotide, vector, cell, composition, or molecule may be administered). A pharmaceutical-grade polypeptide, conjugate, antibody, polynucleotide, vector, cell, composition, or molecule is not a crude polypeptide, conjugate, antibody, polynucleotide, vector, cell, composition, or molecule.

[0283] “Homologue(s)” as used herein means two or more molecules that, despite originating from a different genus or species of organism and/or having divergent structure, have essentially the same function. To denote similar functionality herein, “PglL” or “PilE” may be used to refer to oligosaccharyltransferases or pilin, respectively, even if alternate designations are used in the art (for example, “PaPglL” herein encompasses the oligosaccharyltransferase referred to as “PglO” from Neisseria gonorrhoeae and that is a known homologue of N. meningitidis PglL ([16], [17]; see also [14], [18], [19])).

[0284] “Endogenous” as used herein means the referenced two or more polypeptides, conjugates, antibodies, polynucleotides, vectors, cells, compositions, or molecules originate from the same species of organism, or, in the case of a synthetic or recombinant polypeptide for example, consists essentially of the structure and function as those that originate from the same species of organism. With respect to PglL, for example, “endogenous” refers to the relationship of the subject PglL to the subject pilin (or GlycoTag therefrom) and means that they both originate from the same species of organism, or consist essentially of the structure and function as those that originate from the same species of organism. As an example, a Neisseria meningitidis PglL is “endogenous” to N. meningitidis PilE (and in this way, a PglL may be said to be “endogenous to” the referenced pilin). As a further example, a Neisseria meningitidis PglL is “endogenous to” N. meningitidis cells (especially control or wild type N. meningitidis cells).

[0285] “Heterologous” as used herein means the referenced two or more things are not associated with each other in nature. In certain embodiments, a protein is “heterologous” to a cell if a comparable naturally occurring cell (e.g., wild type cell under comparable conditions) would not produce that protein. In certain embodiments, a periplasmic signal sequence is “heterologous” to a protein (or to the protein's amino acid sequence) because the comparable naturally occurring protein (e.g., wild type protein) would not be operatively linked to that signal sequence.

[0286] “Nucleic acid,” “nucleotide,” “polynucleotide” is used to refer to ribonucleic acid (RNA), deoxyribonucleic acid (DNA), a polyribonucleotide molecule, or a polydeoxyribonucleotide molecule whether or not modified, unmodified, or synthetic. Thus, polynucleotides as defined herein may include single- and double-stranded DNA, DNA including single- and double-stranded regions, single- and double-stranded RNA, and RNA including single- and double-stranded regions, hybrid molecules comprising DNA and RNA that may be single-stranded or, more typically, double-stranded or include single- and double-stranded regions. Thus, DNAs or RNAs with backbones modified for stability or for other reasons are “polynucleotides” as that term is intended herein. DNAs or RNAs may be synthetic (including, without limitation, the nucleic acid subunits that together form the polynucleotide). Moreover, DNAs or RNAs comprising unusual bases, such as inosine, or modified bases, such as tritiated bases, are included within the term “polynucleotides” as defined herein. In general, the term “polynucleotide” embraces all chemically, enzymatically and/or metabolically modified forms of unmodified polynucleotides. Polynucleotides can be made by a variety of methods, including in vitro recombinant DNA-mediated techniques and by expression of DNAs in cells and organisms. Polynucleotides include genomic and plasmid nucleic acids. DNA includes, without limitation, genomic (nuclear) DNA having introns, e.g., as well as recombinant DNA such as cDNA (e.g., introns removed). RNA includes, without limitation, mRNA and tRNA. It is envisioned that codon optimization is utilized for any recombinant expression of a polynucleotide molecule of the present invention.

[0287] “Vector” refers to a vehicle by which nucleic acid molecules are contained and transferred from one environment to another or that facilitates the manipulation of a nucleic acid molecule. A vector may be, for example, a cloning vector, an expression vector, or a plasmid. Vectors include, for example, a BAC or a YAC vector. The term “expression vector” includes, without limitation, any vector, (e.g., a plasmid, cosmid or phage chromosome) containing a coding sequence suitable for expression by a cell (e.g., wherein the coding sequence is operatively linked to a transcriptional control element such as a promoter). A vector may comprise two or more nucleic acid molecules, in certain embodiments each of those two or more nucleic acid molecules comprises a nucleotide sequence that encodes a protein.

[0288] “Polypeptide” and “protein” are used interchangeably herein to refer to polymers of amino acids of any length. “Peptide” may be used to refer to a polymer of amino acids consisting of 1 to 50 amino acids. The polymer can be linear or branched, it can comprise modified amino acids, and it can be interrupted by non-amino acids. The terms also encompass an amino acid polymer that has been modified naturally or by intervention; for example, disulfide bond formation, glycosylation (except the O-glycosylation of modified carrier proteins), lipidation, acetylation, phosphorylation, amidation, derivatization by known protecting/blocking groups, proteolytic cleavage, modification by non-naturally occurring amino acids, or any other manipulation or modification, such as conjugation with a labeling component. Also included within the definition are, for example, polypeptides containing one or more analogs of an amino acid (including, for example, unnatural amino acids, etc.), as well as other modifications known in the art.

[0289] A “Glycan” is a large carbohydrate molecule containing smaller sugar molecules and in certain embodiments herein refers to the oligosaccharide chain of a “glycoprotein” (a protein comprising glycan(s) covalently attached to amino acid side chains). “O-glycan” or “O-linked-glycan” is used herein to reference a glycan that is covalently attached to a serine or threonine residue of another molecule (i.e., the glycan is engaged in o-linked glycosylation). Glycans may be immunogenic. [3].

[0290] “Reducing end” of an oligosaccharide or polysaccharide is the monosaccharide with a free anomeric carbon that is not involved in a glycosidic bond and is thus capable of converting to the open-chain form. The first sugar (“S-1”) herein is that comprising the reducing end and the second sugar (“S-2”) is that which is adjacent to S-1. The S-2 sugar may be attached to the S-1 sugar by, for example, an α-(1→3), β-(1→3), β-(1→4), or α-(1→6) linkage (see [3]).

[0291] “Antigen” or “immunogen” herein refer to a substance, typically a protein or glycan, which is capable of inducing an immune response in a subject. In certain embodiments, an antigen is a protein (e.g., a glycoprotein) that is “immunologically active,” meaning that once administered to a subject (either directly or by administering to the subject a nucleotide sequence or vector that encodes the protein) it is able to evoke an immune response of the humoral and/or cellular type directed against that protein. “O-antigens” consist of repeats of an oligosaccharide unit (O-unit), which generally has between two and six sugar residues. [20]. O-antigens are components of the outer-membrane of gram-negative bacteria. [20]. In certain embodiments, the glycan is an O-antigen.

[0292] “Adjuvants” are non-antigen substances that enhance the induction, magnitude, and/or longevity of an antigen's immunological effect.

[0293] “Conjugation” references the coupling of carrier protein to saccharide (e.g., by covalent bond).

[0294] “Conjugate” herein means two or more molecules (e.g., proteins) which are attached to each other. The two or molecules are optionally recombinant molecules and/or are heterologous to each other. In certain embodiments, the conjugate comprises two or more molecules, the first being a carrier protein, for example a modified carrier protein, and the remaining one or more molecules being glycans covalently attached to a serine or threonine residue of the carrier protein. In certain embodiments, a conjugate comprises a glycosylated carrier protein, such as an O-glycosylated carrier protein, including an O-glycosylated modified carrier protein. A conjugate may be the result of chemical conjugation or in vitro conjugation (bioconjugation).

[0295] “Antibody” means an immunoglobulin molecule that recognizes and specifically binds to a target, such as a protein, polypeptide, peptide, carbohydrate, polynucleotide, lipid, or combinations of the foregoing through at least one antigen recognition site within the variable region of the immunoglobulin molecule. As used herein, the term “antibody” encompasses intact polyclonal antibodies, intact monoclonal antibodies, multispecific antibodies such as bispecific antibodies generated from at least two intact antibodies, chimeric antibodies, humanized antibodies, human antibodies, fusion proteins comprising an antibody, and any other modified immunoglobulin molecule so long as the antibodies exhibit the desired biological activity. An antibody can be of any the five major classes of immunoglobulins: IgA, IgD, IgE, IgG, and IgM, or subclasses (isotypes) thereof (e.g. IgG1, IgG2, IgG3, IgG4, IgA1 and IgA2), based on the identity of their heavy-chain constant domains referred to as alpha, delta, epsilon, gamma, and mu, respectively. The different classes of immunoglobulins have different and well known subunit structures and three-dimensional configurations. Antibodies can be naked or conjugated to other molecules such as toxins, radioisotopes, etc. The term “antibody fragment” refers to a portion of an intact antibody. An “antigen-binding fragment” refers to a portion of an intact antibody that binds to an antigen. An antigen-binding fragment can contain the antigenic determining variable regions of an intact antibody. Examples of antibody fragments include, but are not limited to Fab, Fab′, F(ab′)2, and Fv fragments, linear antibodies, and single chain antibodies.

[0296] “Antibody response” means production of an anti-antigen antibody. “Inducing an antibody response” or “raising an antibody response” means stimulating in vivo the production of an anti-antigen antibody, e.g., an anti-O-antigen antibody or an anti-glycan-antibody.

[0297] “Identical” or percent “identity” as used in the context of two or more sequences is a reference to the number of nucleotides or amino acids which are the same over the entire length of the aligned sequence (for clarity, a conserved amino acid substitution in this context would not be “the same” but an analog of an amino acid, e.g., is “the same”). There are several known ways to calculate percent identity (see [21]). Unless stated otherwise, percentage identity “X” herein of a first amino acid sequence to a second sequence amino acid is calculated as (100×(Y/Z)), where “Y” is the number of “matches” (amino acid residues scored as identical matches in the alignment of the first and second sequences, as aligned by visual inspection or a particular sequence alignment program) and “Z” is the total number of aligned residues. Therefore, and unless stated otherwise, if the first amino acid sequence is shorter than the second amino acid sequence and percent identity is calculated over “the entire length of the sequence,” “Z” is equal to the length (in number of amino acids) of the first sequence.

[0298] The percent identity can be measured using sequence comparison software or algorithms or by visual inspection. Various algorithms and software are known in the art that can be used to obtain alignments of amino acid or nucleotide sequences. One such non-limiting example of a sequence alignment algorithm is the algorithm described in [22], as modified in [23], and incorporated into the NBLAST and XBLAST programs ([24]). In certain embodiments, Gapped BLAST can be used as described in [24]. BLAST-2, WU-BLAST-2 ([25], ALIGN, ALIGN-2 (Genentech, South San Francisco, Calif.) or Megalign (DNASTAR) are additional publicly available software programs that can be used to align sequences. In certain embodiments, the percent identity between two nucleotide sequences is determined using the GAP program in GCG software (e.g., using a NWSgapdna.CMP matrix and a gap weight of 40, 50, 60, 70, or 90 and a length weight of 1, 2, 3, 4, 5, or 6). In certain alternative embodiments, the GAP program in the GCG software package, which incorporates the algorithm of Needleman and Wunsch ([26]) can be used to determine the percent identity between two amino acid sequences (e.g., using either a Blossum 62 matrix or a PAM250 matrix, and a gap weight of 16, 14, 12, 10, 8, 6, or 4 and a length weight of 1, 2, 3, 4, 5). Alternatively, in certain embodiments, the percent identity between nucleotide or amino acid sequences is determined using the algorithm of Myers and Miller ([27]). For example, the percent identity can be determined using the ALIGN program (version 2.0) and using a PAM120 with residue table, a gap length penalty of 12 and a gap penalty of 4. Appropriate parameters for maximal alignment by particular alignment software can be determined by one skilled in the art. In certain embodiments, the default parameters of the alignment software are used.

[0299] As a non-limiting example, whether any particular polynucleotide or polypeptide has a certain percentage sequence identity (e.g., is at least 80% identical, at least 85% identical, at least 90% identical, and in some embodiments, at least 90%, 91%, 92%, 93%, 94%, 95%, 96%, 97%, 98%, or 99% identical) to a reference sequence can, be determined using known methods such as the Bestfit program (Wisconsin Sequence Analysis Package, Version 8 for Unix, Genetics Computer Group, University Research Park, 575 Science Drive, Madison, Wis. 53711). Bestfit uses the local homology algorithm of Smith and Waterman (Advances in Applied Mathematics 2: 482 489 (1981)) to find the best segment of homology between two sequences. When using Bestfit or any other sequence alignment program to determine whether a particular sequence is, for instance, 95% identical to a reference sequence according to the present invention, the parameters are set such that the percentage of identity is calculated over the full length of the reference nucleotide sequence and that gaps in homology of up to 5% of the total number of nucleotides in the reference sequence are allowed.

[0300] In some embodiments, two nucleic acids or polypeptides of the invention are substantially identical, meaning they have at least 70%, at least 75%, at least 80%, at least 85%, at least 90%, and in some embodiments at least 95%, 96%, 97%, 98%, 99% nucleotide or amino acid residue identity, when compared and aligned for maximum correspondence, as measured using a sequence comparison algorithm or by visual inspection. Identity can exist over a region of the sequences that is at least about 10, about 20, about 40-60 residues in length or any integral value there between, and can be over a longer region than 60-80 residues, for example, at least about 90-100 residues, and in some embodiments, the sequences are substantially identical “over the full length of” the sequences being compared, such as the coding region of a nucleotide sequence for example.

[0301] “Numbered with respect to”, “as compared to”, “numbered according to” is used herein to reference a location in an amino acid sequence while not being limited to that referenced amino acid sequence. It would therefore be understood, for example, that residue “128 numbered with respect to SEQ ID NO: 140” may encompass 129 of SEQ ID NO: 145 as well as 128 of SEQ ID NO: 163 (demonstrated below).

SEQ_ID_NO_140
SAVTEYYLNHGEWPGNNTSAGVATS-SEIK------ 29
SEQ_ID_NO_145
SAVTGYYLNHGTWPKDNTSAGVASSPTDIK------ 30
SEQ_ID_NO_163
GAVTEYEADKGVFPTSNASAGVAAA-ADINGK---- 31

[0302] “Host cell” as used herein refers to a cell into which a molecule (usually a heterologous or non-native nucleic acid molecule) is, has been, or will be introduced. A host cell herein does not encompass a whole human organism (i.e., an “isolated host cell”).

[0303] PglL

[0304] Oligosaccharyltransferases (OSTs or OTases) are membrane-embedded enzymes that transfer oligosaccharides from a lipid carrier to a nascent protein (unlike glycosyltransferases in the cytoplasm, which assemble oligosaccharides by sequential action, OTases transfer glycan to protein en bloc [2]). O-linked glycosylation consists of the covalent attachment of a sugar molecule (a glycan) to a side-chain hydroxyl group of an amino acid residue (e.g. serine, or threonine) in the protein target (e.g., pilin). Pilin-glycosylation gene L (PglL) proteins from, for example Neisseria meningitidis, are OTases involved in O-linked glycosylation. In the periplasm of gram-negative bacteria, PglLs transfer the glycan from Und-PP-glycan to a pilin protein ([1]). Unlike PglB (N-glycosylation), PglL does not require a 2-acetamido group at position C-2 of the reducing end or a β1, 4 linkage between the first two sugars for activity and so is able to transfer virtually any glycan (Neisseria meningitidis PglL transfers, e.g., C. jejuni heptasaccharide, E. coli O7 antigen, E. coli K30 capsular structure, S. enterica O-antigen, and E. coli 016 peptidoglycan subunits to pilin in both E. coli and Salmonella cells) ([1], [3], [14], [16]). NmPglL and homologues thereof, such as PglL from Neisseria gonorrhoeae (called “PglO”, [6] and [19]) and PilO from Pseudomonas aeruginosa ([15]), are therefore substrate “promiscuous” (i.e., they have relaxed substrate specificity and so are able to transfer diverse oligo- and polysaccharides). [1] and [14] (per [3] and [16]). Neisseria meningitidis PglL (NmPglL) Homologues are described herein (see Examples) and known to the art: [17], [28], [18]).

[0305] “PglL OTase” herein encompasses Neisseria meningitidis PglL OTase as well as NmPglL OTase Homologues. Therefore, the term “PglL OTases” herein includes, for example, Neisseria meningitidis PglL (NmPglL) Oligosaccharyltransferase (OTase), Neisseria gonorrhoeae PglL (NgPglL) OTase, Neisseria lactamica 020-06 (NlPglL) OTase, Neisseria lactamica ATCC 23970 PglL (Nl_{ATCC23970PglL}) OTase, and Neisseria gonorrhoeae F62 PglL (Ng_{F62}PglL) OTase.

[0306] “PglL Glycan Substrate”, “PglL Substrate” as used herein is a reference to a glycan which is transferrable by a PglL Otase (i.e., a glycan that is a substrate of PglL). See [1], [14], [29], [3], [16]. In certain embodiments, the PglL Glycan Substrate is attached to a lipid-carrier (“lipid-carrier-linked PglL Glycan Substrate”). In certain embodiments, the lipid-carrier is undecaprenol-pyrophosphate (UndPP), dolichol-pyrophosphate, or a synthetic equivalent thereof. In certain embodiments, the lipid-carrier is UndPP. In certain embodiments, the glycan is a “UndPP-linked PglL Substrate”. It is envisioned that a lipid-carrier-linked glycan is membrane-bound within a gram-negative host cell. A lipid-carrier-linked PglL Glycan Substrate being membrane bound may be said to be located “at the periplasm.” In certain embodiments, a NmPglL Glycan Substrate, a NgPglL Glycan Substrate, a NlPglL Glycan Substrate, or a NsPglL Glycan Substrate is specified. In certain embodiments, the PglL Glycan Substrate comprises a glycan having a reducing end of Glucose, Galactose, Galactofuranose, Rhamnose, GlcNAc, GalNAc, FucNAc, DATDH, GATDH, HexNAc, deoxy HexNAc, diNAcBac, or Pse. In certain embodiments the glycan is immunogenic (e.g., an “immunogenic PglL Glycan Substrate”). In certain embodiments the glycan is an O-antigen (e.g., a “PglL O-antigen Substrate”). See [1], [14], [29], [16], [30], [15].

[0307] Recombinant expression of a Neisserial PglL within a heterologous host cell is described herein and is known by the art (see [10], [8], [9], [29] (e.g., Table 1), [11], [1], [14], [5], [3], [31]; all incorporated herein by reference in their entireties).

[0308] Carrier Proteins

[0309] “Carrier protein” as used herein means a protein suitable for use as a carrier protein in the production of bioconjugate vaccines (e.g., [32]). “Carrier protein” as used herein is distinct from a “lipid carrier” (or “lipid-linked-carrier”), the latter of which include, without limitation, undecaprenyl-pyrophosphate (UndPP).

[0310] A “modified carrier protein” as used herein means a carrier protein that is altered (in one or more way) as compared to wild type (i.e., a “modified carrier protein” excludes a wild type pilin protein). A modified carrier protein includes, without limitation, a carrier protein incorporating one or more GlycoTag, purification tag, deletion (e.g., of at least a part of the transmembrane domain), insertion, and/or mutation (e.g., AcrA mutation(s) ([33]). In certain embodiments, the modified carrier protein is altered as compared to a control carrier protein (e.g., wild type) such that the modified carrier protein may be an “acceptor” of the PglL Glycan Substrate (i.e., accept the PglL Glycan Substrate directly from PglL without pilin intermediate). In certain embodiments, one such modified carrier protein is altered by comprising one or more GlycoTags. In certain embodiments, one such modified carrier protein comprises one or more GlycoTags at its N-terminus, C-terminus, and/or interior residues. For clarity, “a modified carrier protein comprising a carrier protein having one or more GlycoTags at its N-terminus and/or C-terminus” means “a modified carrier protein comprising a carrier protein operably linked to one or more GlycoTags at its N-terminus and/or C-temrinus.”

[0311] In certain embodiments, the modified carrier protein is covalently coupled to a glycan, either directly (e.g., via an O-linked glycosidic bond) or indirectly (e.g., via a linker), wherein the coupling is at one or more of the GlycoTags. In further embodiments, the glycan is a PglL Glycan Substrate. In certain embodiments, the modified carrier protein is coupled to a Shigella glycan (e.g. a Shigella sonnei glycan (such as S. sonnei O-antigen), or e.g. a Shigella flexneri glycan (such as Shigella flexneri 2a CPS), or a Shigella dysenteriae glycan). In certain embodiments, the modified carrier protein is coupled to a Streptococcus glycan (e.g. Streptococcus pneumoniae (such as Streptococcus pneumoniae sp. 12F CPS, S. pneumoniae sp. 8 CPS, S. pneumoniae sp. 14 CPS, S. pneumoniae sp. 23A CPS, S. pneumoniae sp. 33F CPS, or S. pneumoniae sp. 22A CPS)).

[0312] “O-glycosylated modified carrier protein” means the modified carrier protein is glycosylated and, in particular, is engaged in O-linked glycosylation (e.g., a modified carrier protein that is O-linked to a PglL Glycan Substrate).

[0313] An O-glycosylated modified carrier protein may be directly or indirectly attached to two or more distinct immunogenic glycans and, in this way, useful for inducing an immune or antibody response to the two or more immunogenic glycans (i.e., multivalent).

[0314] Exemplary carrier proteins include, without limitation, detoxified Exotoxin A of P. aeruginosa (“EPA”; see, e.g., [4]), CRM197, maltose binding protein (MBP), Diphtheria toxoid (DT), Tetanus toxoid (TT), Tetanus Toxin C fragment (TTc), detoxified hemolysin A of S. aureus, clumping factor A, clumping factor B, E. coli FirmH, E. coli FirmHC, E. coli heat labile enterotoxin, detoxified variants of E. coli heat labile enterotoxin, Cholera toxin B subunit (CTB), cholera toxin, detoxified variants of cholera toxin, E. coli Sat protein, the passenger domain of E. coli Sat protein, Streptococcus pneumoniae Pneumolysin and detoxified variants thereof, C. jejuni Acriflavine resistance protein A (CjAcrA), E. coli Acriflavine resistance protein A (EcAcrA), Pseudomonas aeruginosa PcrV protein (PcrV), C. jejuni natural glycoproteins, S. pneumoniae NOX, S. pneumoniae PspA, S. pneumoniae PcpA, S. pneumoniae PhtD, S. pneumoniae PhtE, S. pneumoniae ply (e.g. detoxified ply), S. pneumoniae LytB, Haemophilus influenzae protein D (PD). [34], [35], [36]. In certain embodiments, the carrier protein is selected from the group consisting of CTB, TT, TTc, DT, CRM197, EPA, EcAcrA, CjAcrA, and PcrV. In certain embodiments, the carrier protein is selected from the group consisting of EPA, EcAcrA, CjAcrA, and PcrV. In certain embodiments, the carrier protein is EPA. In certain embodiments, the carrier protein is EcAcrA.

[0315] In certain embodiments, the carrier protein is protein D from Haemophilus influenzae (PD), for example, protein D sequence from FIG. 9 of [37] (FIG. 9a and 9b together, 364 amino acids). Inclusion of this protein in the immunogenic composition may provide a level of protection against Haemophilus influenzae related otitis media ([38]). The Protein D may be used as a full length protein or as a fragment (for example, Protein D may be as described in [39]). For example, a protein D sequence may comprise (or consist) of the protein D fragment as described in [37] lacking the 19 N-terminal amino acids from FIG. 9 of [37], optionally with the tripeptide MDP from NS1 fused to the N-terminal of said protein D fragment (348 amino acids). In one aspect, the protein D or fragment of protein D is unlipidated.

[0316] In an embodiment, the carrier protein is CRM197. CRM197 is a non-toxic form of the diphtheria toxin but is immunologically indistinguishable from the diphtheria toxin (DT). Genetically detoxified analogues of diphtheria toxin include CRM197 and other mutants described in U.S. Pat. Nos. 4,709,017, 5,843,711, 5,601,827, and 5,917,017. CRM197 is produced by C. diphtheriae infected by the nontoxigenic phase β197tox-created by nitrosoguanidine mutagenesis of the toxigenic carynephage b ([40]). The CRM197 protein has the same molecular weight as the diphtheria toxin but differs from it by a single base change in the structural gene. This leads to a glycine to glutamine change of amino acid at position 52 which makes fragment A unable to bind NAD and therefore non-toxic ([41], [42]).

[0317] In an embodiment, the carrier protein is Tetanus Toxoid (TT). Tetanus toxin is a single peptide of approximately 150 kDa, which consists of 1315 amino-acid residues. Tetanus-toxin may be cleaved by papain to yield two fragments; one of them, fragment C, is approximately 50 kDa. Fragment C of TT is described in [43].

[0318] In an embodiment, the carrier protein is dPly (detoxified pneumolysin). Pneumolysin (Ply) is a multifunctional toxin with a distinct cytolytic (hemolytic) and complement activation activities ([44]). The toxin is not secreted by pneumococci, but it is released upon lysis of pneumococci under the influence of autolysin. Its effects include e.g., the stimulation of the production of inflammatory cytokines by human monocytes, the inhibition of the beating of cilia on human respiratory epithelial, the decrease of bactericidal activity and migration of neutrophils, and in the lysis of red blood cells, which involves binding to cholesterol. Because it is a toxin, it needs to be detoxified (i.e., non-toxic to a human when provided at a dosage suitable for protection) before it can be administered in vivo. Expression and cloning of wild-type or native pneumolysin is known in the art. See, for example, [45], [46], and [47]. Detoxification of Ply can be conducted by chemical means, e.g., subject to formalin or glutaraldehyde treatment or a combination of both ([48], [49]). Such methods are known in the art for various toxins. Alternatively, Ply can be genetically detoxified (altered so that it is biologically inactive whilst still maintaining its immunogenic epitopes, e.g., [50], [51], and [52]. As used herein, it is understood that the term “Ply” encompasses mutated pneumolysin and detoxified pneumolysin (dPly) suitable for pharmaceutical use (i.e., non toxic).

[0319] Nucleic acids encoding the carrier protein can be introduced into a host cell for the production of a bioconjugate comprising a carrier protein. For use in in vivo bioconjugation within a gram-negative bacterium, carrier proteins are located within the periplasm. A carrier protein may be targeted to the periplasm by use of a periplasmic signal sequence. Periplasmic signal sequence structure and use (including their cleavage, codon optimization, and recombinant attachment to a heterologous protein) is known in the art. See, e.g., [53], [54], [5], and [34]. Codon optimization, generally, is also well known in the art and, unless stated otherwise (including Examples), it is envisioned that codon optimization is utilized for any recombinant expression of the present invention. See, e.g., [55], [56], [57], [58], [59] [60].

[0320] Signal sequences, including periplasmic signal sequences, are usually removed during translocation of the protein into, for example, the periplasm by signal peptidases (i.e., a mature protein is a protein from which at least the signal sequence has been removed). “Targeted to the periplasm” is used herein to acknowledge that signal sequences are usually removed. In this way, a protein which is “targeted to the periplasm” includes both the protein operably linked to the periplasmic signal sequence and the mature protein from which the periplasmic signal sequence has already been removed.

[0321] Periplasmic signal sequences are well known in the art. In certain embodiments, the periplasmic signal is that of Erwinia carotovorans pectatelyase B (pelB), E. coli outer membrane porin A (OmpA), E. coli disulfide oxidoreductase (DsbA), E. coli Tol-Pal cell envelop complex (TolB), E. coli maltose binding protein subunit (MalE), E. coli flagellin (Flgl), Heat-liable enterotoxin (LtIIb) (e.g., E. coli LtIlb), SipA (e.g., Streptococcus pyogenes SipA, Clostridium acidurici SipA, Bacillus amyloliquefaciens SipA), E. coli nickel-binding protein NikA (NikA), Bacillus sp. Endoxylanase (XynA), E. coli Heast Stable Enterotoxin II (STII), or E. coli alkaline phosphatase subunit (PhoA). [5]. In certain embodiments, the periplasmic signal sequence is PelB, OmpA, DsbA, TolB, or MalE. In certain embodiments, the periplasmic signal sequence is DsbA.

[0322] In certain embodiments, the carrier proteins comprise a “tag,” i.e., a sequence of amino acids that allows for the detection, isolation and/or identification of the carrier protein. For example, adding a tag to a carrier protein can be useful in the purification of that protein and, hence, the purification of a bioconjugate comprising the tagged carrier protein. Exemplary tags that can be used herein include, without limitation, histidine (HIS) tags (e.g., hexa histidine-tag, or 6×His-Tag), FLAG-TAG, and HA tags also strep tag, myc tag, or combinations thereof. In certain embodiments, the tags used herein are removable, e.g., removal by chemical agents or by enzymatic means, once they are no longer needed, such as after the protein has been purified.

[0323] A “purification tag” as used herein refers to a ligand that aids protein purification with, for example, size exclusion chromatography, ion exchange chromatography, and/or affinity chromatography. Purification tags and their use are well known to the art (see, e.g., [61], [62]) and may be, for example, poly-histidine (HIS), glutathione S-transferase (GST), c-Myc (Myc), hemagglutinin (HA), FLAG, or maltose binding protein (MBP). In certain embodiments, apurification tag is an epitope tag (which include, e.g., a histidine, FLAG, HA, Myc, V5, Green Fluorescent Protein (GFP), GSK, β-galactosidase (b-GAL), luciferase, Maltose Binding Protein (MBP), or Red Fluorescence Protein (RFP) tag). In certain embodiments, polypeptides are operably linked to one or more purification tags (including combinations of purification tags). A step of purifying, collecting, obtaining, or isolating a protein may therefore include size exclusion chromatography, ion exchange chromatography, or affinity chromatography. In certain embodiments, a step of purifying a modified carrier protein (or a conjugate comprising it), utilizes affinity chromatography and, for example, a σ28 affinity column or an affinity column comprising an antibody that binds the modified carrier protein or the conjugate comprising it (optionally by binding to the glycn). In a certain embodiment, a step of purifying a fusion protein comprising at least a modified carrier protein operably linked to a purification tag utilizes affinity chromatography and, for example, an affinity column that binds the purification tag.

[0324] GlycoTags

[0325] “GlycoTag” as used herein is a recombinant O-linked glycosylation site and consists of a fragment of a pilin amino acid sequence. In this way, the term “Glycotag” is used to refer to a recombinant amino acid sequence (i.e., separated from a wild type pilin) whereas “sequon” may be used to refer to that same sequence that is located within a wild type pilin (i.e., not separated from a wild type pilin).

[0326] The use of multiple GlycoTags within one carrier protein is envisioned (see Examples), optionally, multiple GlycoTags being adjacent to each other. Two or more GlycoTags may be separated by a “Amino Acid Linker” consisting of one or more amino acids, which can be, for example, one or more glycine ([63]), one or more serine, and/or combinations thereof (See [64]). An “amino acid linker” herein is a type of “linker”.

[0327] O-glycosylation efficiency of GlycoTags located at the N- or C-terminus of a carrier protein may be increased by flanking the GlycoTag (i.e., placing toward the N-terminus and/or toward the C-terminus of the GlycoTag) with one or more “Flanking Peptide” (a peptide comprising hydrophilic amino acids such as, for example, DPRNVGGDLD (residues 599-608 of SEQ ID NO: 1) or QPGKPPR (residues 628-634 of SEQ ID NO: 1)). [3]. Such Flanking Peptide may be adjacent to the GlycoTag (i.e., with no amino acids between the GlycoTag and the Flanking Peptide) or may have 1, 2, 3, 4, 5, 6, 7, 8, 9, or 10 amino acids between it and the GlycoTag. An insertion of two or more Flanking Peptides can be used. Flanking Peptides can be used to increase the O-glycosylation efficiency of shorter GlycoTags, such as those having the sequence SEQ ID NO: 142, 147, 151, or 164 (all 12 amino acids long).

[0328] Hydrophilic amino acids herein include arginine (R), lysine (K), aspartic acid (D), glutamic acid (E), glutamine (Q), asparagine (N), histidine (H), serine (S), threonine (T), tyrosine (Y), cysteine (C), and tryptophan (W).

[0329] Glycans

[0330] A glycan is any sugar that can be transferred (e.g, covalently attached) to a carrier protein. A glycan comprises monosaccharides, oligosaccharides and polysaccharides. An oligosaccharide is a glycan having 2 to 10 monosaccharides. A polysaccharide is a glycan having greater than 10 monosaccharides. Polysaccharides can be selected from the group consisting of O-antigens, capsules, and exopolysaccharides.

[0331] Glycans for use with the present invention are PglL Otase substrates. [1], [14], [29], [16], [30], and [15]. In certain embodiments, the glycan is operably linked to a lipid-carrier. In certain embodiments, the glycan can be, but is not limited to, hexoses, N-acetyl derivatives of hexoses, oligosaccharides, and polysaccharides. In certain embodiments, the monosaccharide at the reducing end of the glycan is a hexose or an N-acetyl derivative of a hexose. In a certain embodiment, the glycan comprises a hexose monosaccharide at its reducing end such as glucose, galactose, rhamnose, arabinotol, fucose or mannose. In certain embodiments, the hexose monosaccharide at the reducing end is glucose or galactose. In certain embodiments, the reducing end of the glycan is an N-acetyl derivative of hexose. In general, N-acetyl derivatives of hexose (or “hexose monosaccharide derivatives”) comprise an acetamido group at position 2. In certain embodiments, N-acetyl derivatives of hexose is selected from N-acetylglucosamine (GlcNAc), N-acetylhexosamine (HexNAc), deoxy HexNAc, and 2,4-diacetamido-2,4,6-trideoxyhexose (DATDH), N-acetylfucoseamine (FucNAc), and N-acetylquinovosamine (QuiNAc). In certain embodiments, the N-acetyl derivative of hexose is selected from N-acetylglucosamine (GlcNAc), N-acetylgalactosamine (GalNAc), N-acetylfucoseamine (FucNAc), 2,4-diacetarnido-2,4,6-trideoxyhexose (DATDH), glyceramido-acetamido trideoxyhexose (GATDH), and N-acetylhexosamine (HexNAc). In certain embodiments, the glycan has a reducing end of N,N-diacetylbacillosamine (diNAcBac) or Pseudaminic acid (Pse). In certain embodiments, the glycan is one that has a reducing end of Glucose, Galactose, arabinotol, fucose, mannose, Galactofuranose, Rhamnose, GlcNAc, GalNAc, FucNAc, DATDH, GATDH, HexNAc, deoxy HexNAc, QuiNAc, diNAcBac, or Pse. In certain embodiments, the glycan is one that has a reducing end of Glucose, Galactose, GlcNAc, GalNAc, FucNAc, DATDH, GATDH, HexNAc, deoxy HexNAc, or diNAcBac. In certain embodiments, the glycan is one that has a reducing end of Glucose, Galactose, Galactofuranose, Rhamnose, GlcNAc, GalNAc, FucNAc, DATDH, GATDH, or diNAcBac. In certain embodiments, the glycan is one that has a reducing end of Glucose, Galactose, GlcNAc, GalNAc, FucNAc, DATDH, GATDH, or diNAcBac. In certain embodiments, the glycan is one that has a reducing end selected from the group consisting of DATDH, GlcNAc, GalNAc, FucNAc, Galactose, and Glucose. In certain embodiments, the glycan is one that has a reducing end GlcNAc, GalNAc, FucNAc, or Glucose. In certain embodiments, the glycan is one that has a S-2 to S-1 reducing end of Galactose-β1,4-Glucose; Glucuronic acid-β1,4-glucose; N-acetyl-fucosamine-α1,3-N-acetyl-galactosamine; Galactose-β1,4-glucose; Rhamnose-β1,4-glucose; Galactofuranose-β1,3-glucose; N-acetyl-altruronic acid-α1,3-4-amino-N-acetyl-fucosamine; or Rhamnose-β1,4-N-acetylgalactosamine.

[0332] In certain embodiments, the glycan is endogenous to a Neisseria, Shigella, Salmonella, Streptococcus, Escherichia, Pseudomonas, Yersinia, Campylobacter, or Heliobacter cell. In certain embodiments, the glycan is endogenous to a Shigella, Salmonella, Escherichia, or Pseudomonas cell. In certain embodiments, the glycan is endogenous to a Shigella flexneri, Salmonella paratyphi, Salmonella enterica, or E. coli cell. In certain embodiments, the glycan is from C. jejuni, N. meningitidis, P. aeruginosa, S. enterica LT2, or E. coli. See [3], [29], [1], [14].

[0333] In certain embodiments, the glycan is an immunogenic glycan (an antigen). In certain embodiments, the glycan is an O-antigen. In certain embodiments, the glycan is an immunogenic O-antigen endogenous to a Neisseria, Shigella, Salmonella, Streptococcus, Escherichia, Pseudomonas, Yersinia, Campylobacter, or Heliobacter cell. In further embodiments, the PglL Glycan Substrate is a Shigella sonnei glycan antigen e.g. S. sonnei O-antigen, a Shigella flexneri glycan antigen e.g. Shigella flexneri 2a CPS, a Shigella dysenteriae glycan antigen, a Streptococcus pneumoniae glycan antigen e.g. Streptococcus pneumoniae sp. 12F CPS, S. pneumoniae sp. 8 CPS, S. pneumoniae sp. 14 CPS, S. pneumoniae sp. 23A CPS, S. pneumoniae sp. 33F CPS, or S. pneumoniae sp. 22A CPS. In certain embodiments, the glycan is a Streptococcus pneumoniae glycan having a reducing end of Glucose, Galactose, arabinotol, fucose, mannose, Galactofuranose, Rhamnose, GlcNAc, GalNAc, FucNAc, DATDH, GATDH, HexNAc, deoxy HexNAc, QuiNAc, diNAcBac, or Pse. In certain embodiments, the glycan is a Streptococcus pneumoniae glycan is one that has a S-2 to S-1 reducing end of Galactose-β1,4-Glucose; Glucuronic acid-β1,4-glucose; N-acetyl-fucosamine-α1,3-N-acetyl-galactosamine; Galactose-β1,4-glucose; Rhamnose-β1,4-glucose; Galactofuranose-β1,3-glucose; N-acetyl-altruronic acid-α1,3-4-amino-N-acetyl-fucosamine; or Rhamnose-β1,4-N-acetylgalactosamine. The CP gene clusters of all 90 S. pneumoniae serotypes have been sequenced by Sanger Institute (http://WorldWideWeb(www).sanger.ac.uk/Projects/S_pneumoniae/CPS/). Sequences are provided in NCBI as Genbank CR931632-CR931722. The capsular biosynthetic genes of S. pneumoniae are further described in Serotype 23A from Streptococcus pneumoniae strain 1196/45 (serotype 23a) as NCBI GenBank accession number: CR931683.1. Serotype 23B from Streptococcus pneumoniae strain 1039/41 as NCBI GenBank accession number: CR931684.1. Serotype 23F from Streptococcus pneumoniae strain Dr. Melchior as NCBI GenBank accession number: CR931685.1.

[0334] In certain embodiments, the glycan is an S. sonnei O-antigen. In certain embodiments, the S. sonnei O-antigen consists of a wbgT protein, a wbgU protein, a wzx protein, a wzy protein, a wbgV protein, a wbgW protein, a wbgX protein, a wbgY protein, and a wbgZ protein. In certain embodiments, the S. sonnei O-antigen consists of a wbgT protein having at least 90% identity to SEQ ID NO: 108, a wbgU protein having at least 90% identity to SEQ ID NO: 109, a wzx protein having at least 90% identity to SEQ ID NO: 110, a wzy protein having at least 90% identity to SEQ ID NO: 111, a wbgV protein having at least 90% identity to SEQ ID NO: 112, a wbgW protein having at least 90% identity to SEQ ID NO: 113, a wbgX protein having at least 90% identity to SEQ ID NO: 114, a wbgY protein having at least 90% identity to SEQ ID NO: 115, and a wbgZ protein having at least 90% identity to SEQ ID NO: 116).

[0335] Applications Thereof

[0336] Conjugation

[0337] As provided herein, the modified carrier proteins can be used for bioconjugation. In certain embodiments, the modified carrier proteins can be used for in vivo bioconjugation within a gram-negative bacterial host cell. In certain embodiments, the modified carrier proteins can be used for conjugate production by incubating the modified carrier protein with a Neisserial PglL and a PglL glycan substrate, optionally in a suitable buffer.

[0338] In Vivo Bioconjugation

[0339] In certain embodiments, O-glycosylated modified carrier proteins are produced using in vivo methods and systems. In certain embodiments, an O-glycosylated modified carrier protein (or bioconjugate) is made and then isolated from the periplasm of the host cell. In vivo conjugation (“bioconjugation”) of the present invention utilizes known methodologies for recombinant protein expression within a gram-negative bacterial cell and isolation therefrom, including sequence selection and optimization, vector design, cloning plasmids, culturing parameters, and periplasmic purification techniques. See, e.g., [65], [3], [5], [7], [8], [9], [10], [11], [1], [14], [4], [63], and [31]. Methods of producing bioconjugates using host cells are described in, for example, [66] and [67]. Bioconjugation offers advantages over in vitro chemical conjugation in that bioconjugation requires less chemicals for manufacture and is more consistent in terms of the final product generated.

[0340] Gram-negative bacterial cells for use with the present invention include, but are not limited to, a cell from the genera Neisseria, Shigella, Salmonella, Escherichia, Pseudomonas, Yersinia, Campylobacter, Vibrio, Klebsiella, or Helicobacter. In certain embodiments, the host cell is selected from the group consisting of Neisseria, Shigella, Salmonella, Escherichia, Pseudomonas, Yersinia, Campylobacter, and Helicobacter cells. In certain embodiments, the host cell is selected from the group consisting of Shigella, Salmonella, and Escherichia cells. In an embodiment, the gram-negative bacterial cell is classified as a Neisseria ssp., Shigella ssp., Salmonella ssp., Escherichia ssp., Pseudomonas ssp., Yersinia ssp., Campylobacter ssp., Vibrio ssp., Klebsiella ssp., or Helicobacter ssp. cell. The gram-negative bacterial host cell may be classified as a Neisserial ssp. cell other than Neisseria elongata. In a further embodiment, the gram-negative bacterial cell is a Shigella flexneri, Salmonella paratyphi, Salmonella enterica, E. coli, or Pseudomonas aeruginosa cell. In an embodiment, the host cell is selected from the group consisting of Shigella flexneri, Salmonella paratyphi, and Escherichia coli cells. In certain embodiments, the host cell is a Vibrio cholerae cell. In certain embodiments, the host cell is an Escherichia coli cell. In an embodiment, the gram-negative bacterial cell originated from E. coli strain K12, Top10, W3110, CLM24, BL21, SCM6 or SCM7. In certain embodiments, the host cell is a Shigella flexneri cell. In certain embodiments, the host cell is a Salmonella enterica cell. In an embodiment, the gram-negative bacterial cell originated from S. enterica strain SL3261, SL3749, SL326iδwaaL, or SL3749. In certain embodiments, the host cell is a Salmonella paratyphi cell. In certain embodiments, the host cell is a Pseudomonas aeruginosa cell. See [10], [8], [9], [29] at e.g. Table 1 and [11]; [3], [31], [5], [1], [14].

[0341] In certain embodiments, the gram-negative bacterial cell is modified such that the cell's endogenous (periplasmic) O-antigen ligase (or “endogenous PglL homologue”) is reduced (deficient or “knockdown”) or knocked-out (KO) in expression or function as compared to control (e.g., wild type). In certain embodiments, “reduction of endogenous PglL homologue” or “the endogenous PglL homologue is reduced” is used to mean a reduction (e.g., a knockdown), which encompasses a knock-out, of the expression or function of the endogenous PglL homologue. In that way, a gram-negative bacterial cell of the present invention may be deficient in its endogenous PglL homologue. For example, the WaaL gene of E. coli and that of Salmonella enterica are functional homologues of N. meningitidis PglL ([17], [28], and [68]). It is therefore envisioned that, for example, an Escherichia or Salmonella host cell for use with the present invention is modified such that the expression or function of WaaL is at least reduced as compared to a control (optionally wild type) Escherichia or Salmonella cell under essentially the same conditions. In certain embodiments, the host cell's endogenous PglL gene (e.g., the waaL gene) has been replaced by a heterologous nucleotide sequence encoding an oligosaccharyltransferase. Techniques for knocking down or knocking out an endogenous PglL homologue are known and include, for example, mutation or deletion of the gene encoding the endogenous PglL homologue. See the Examples and, e.g., [3]; see also [18].

[0342] Host cells of the present invention may utilize endogenous or heterologous glycosyltransferases for sequential assembly of oligosaccharides in the cytosol (cytosolic glycosyltransferases). Such glycosyltransferases include, for example, Neisseria PglD, PglC, PglB/PglB2, and PglA shown at FIG. 1 and [2] (see also [103], particularly for Neisseria gonorrhoeae and see also [104], particularly for Neisseria elongata). The term “glycosyltransferases” is used herein as it is used by the art, to encompass what may be called “phospho-glycosyltransferases” (e.g., Neisserial PglB [103]). A gram-negative bacterial host cell may be modified to comprise a heterologous (e.g., bacterial or gram-negative bacterial) glycosyltransferase and optionally further modified to comprise reduced endogenous glycosyltransferase as compared to wild type (e.g. reduced expression of the corresponding endogenous glycosyltransferase). A host cell of the present invention may be chosen because its endogenous glycosyltransferases produce the target glycan or a host cell of the present invention may be engineered to express a heterologous glycosyltransferase(s) that assemble the target glycan (optionally further modified such that the host cell does not express the corresponding endogenous glycosyltransferase(s)). Such heterologous glycosyltransferases are not limited by origin so long as the glycosyltransferase assembles the target glycan structure. Activated sugar donors and their transporters or acceptors are also present. Glycosyltransferase selection and host cell engineering for target glycan assembly is common and well-known in the art ([105], [106]). In fact, “there is sufficient knowledge to predict the role of individual [glycosyltransferase] enzymes and assign them to specific pathways, allowing in silico prediction of the [glycosyltransferase]enzyme repertoire required to generate a particular glycan on a particular glycoconjugate” [106]. There are also tools publicly available by which a person with ordinary skill in the art may identify a glycosyltransferase which is capable of assembling the target glycan by searching for a glycosyltransferase having a particular function (i.e., searching the target glycan synthesis reaction) (e.g., Carbohydrate Active EnZYmes database WorldWideWeb.cazy.org/GlycosylTransferases) and/or by a structure-based search of the target glycan (e.g., the Bacterial Carbohydrate Structure DataBase (csdb.glycoscience.ru/bacterial) wherein glycosyltransferase information is provided, if previously published, for the glycan structure searched).

[0343] “O-glycosylation Machinery” is used to collectively reference the molecules (e.g. glycosyltransferases, flippases, polymerases, oligosaccharyltransferases including gene clusters and organelles) and processes for O-glycosylation which are well known to the art. See, e.g., [69], [3], [5], [31], [10], [8], [9], [29], [11]. In certain embodiments, a gram-negative bacterial host cell comprises O-glycosylation machinery that are endogenous, heterologous, or combinations thereof, to the host cell. In a fcurther embodiment, a gram-negative bacterial host cell comprises O-glycosylation machinery with the proviso that the cell's endogenous PglL or PglL homologue is reduced as compared to control. In a fcurther embodiment, a gram-negative bacterial host cell comprises endogenous O-glycosylation machinery with the proviso that the cell's endogenous PglL or PglL homologue is reduced as compared to control. In a certain embodiment the E. coli or S. enterica gram-negative host cell comprises endogenous O-glycosylation machinery with the proviso that the cell's PglL homologue WaaL is reduced as compared to control.

[0344] Again, codon optimization is well known in the art and, unless stated otherwise (including Examples), it is envisioned that codon optimization is utilized for any recombinant expression of the present invention.

[0345] The expression of the transgenes of the present invention can be under the control of a transcription control element (TCE) which includes, for example, a promoter. In certain embodiments, the transgene is under the control of a constitutive promoter or of an inducible promoter, which initiates transcription only when exposed to some particular external stimulus, such as, without limitation, antibiotics such as tetracycline, hormones such as ecdysone, or heavy metals. The promoter can also be specific to a particular cell-type, tissue or organ. Many suitable promoters and enhancers are known in the art, and any such suitable promoter or enhancer may be used for expression of the transgenes of the invention. Promoters for use with the present invention are known and include, without limitation, ParaBAD, arabinose, tac-promoter (Ptac), and constitutive promoters (including native constitutive promoters) ([4]; see also [10], [8], [9], [29], [11]). In certain embodiments, the promoter is a ParaBAD or arabinose promoter.

[0346] The incorporation of a nucleic acid molecule into a gram-negative bacterial cell can be performed using any number of techniques known in the art, including those for stable transfection or transformation of a nucleic acid molecule or vector into a host cell. See the references cited above and the techniques listed and described in [70]. Recombinant nucleic acids can be introduced into the host cells of the invention using methods such as electroporation, chemical transformation by heat shock, natural transformation, phage transduction, and conjugation. In certain embodiments, recombinant nucleic acids are introduced into a host cell using a plasmid (e.g. the recombinant nucleic acids are expressed in the host cell by a plasmid such as an expression vector). In another embodiment, recombinant nucleic acids are introduced into a host cell using the method of insertion described in [71].

[0347] Gram-negative bacterial cells incorporating the glycosyltransferases, modified carrier proteins, PglL Otases, or PglL Glycan Substrates of this invention can be grown using various methods known in the art, for example, grown in a broth culture. The modified carrier proteins or O-glycosylated modified carrier proteins produced by the cells can be isolated using various methods known in the art, for example, lectin affinity chromatography ([1]).

[0348] An O-glycosylated modified carrier protein may be purified (to remove host cell impurities and unglycosylated carrier protein) and optionally characterized by techniques known in the art (see, e.g., [4], [72]; see also [10], [8], [9], [29], and [11]). Purification of a bioconjugate may be by cell lysis (including, e.g., one or more centrifugation steps) followed by one or more isolation steps (including, e.g., one or more chromatography steps or a combination of fractionation, differential solubility, centrifugation, and/or chromatography steps). Said one or more chromatographic steps may comprise ion exchange, anionic exchange, affinity, and/or sizing column chromatography, such as Ni2+ affinity chromatography and/or size exclusion chromatography. In a certain embodiment, one or more chromatographic steps comprises ion exchange chromatography. Therefore, one or more of the purified polypeptides may be operably linked to a tag (a purification tag). For example, affinity column IMAC (Immobilized metal ion affinity chromatography) may be used to bind the poly-histidine tag operably linked to the carrier protein, followed by anion exchange chromatography and size exclusion chromatography (SEC). For example, purification of a bioconjugate may be by osmotic shock extraction followed by anionic and/or size exclusion chromatography ([7]); or by osmotic shock extraction followed by Ni-NTA affinity and fluoroapatite chromatography ([4]).

[0349] In Vitro Conjugation

[0350] To produce O-glycosylated modified carrier proteins in vitro, the PglL OTase can be incubated with the modified carrier protein and PglL glycan substrate in, for example, a buffer. In certain embodiments, the bugger has a pH of approximately 6 to approximately 8. In one aspect, the buffer may be phosphate buffer saline. In another aspect, the buffer may be Tris-HCl 50 mM, having a pH of 7.5.

[0351] In certain embodiments, chemical conjugation using known protocols is used (e.g., [73], [74], [75]). Thereby, a glycan may be covalently linked (either directly or through a linker) to an amino acid residue of a modified carrier protein. “Directly linked” herein means that the two entities are connected via a chemical bond, for example a covalent bond. “Indirectly linked” herein means that the two entities are connected via a linking moiety (“linker”) (as opposed to a direct covalent bond). In certain embodiments the linking moiety is adipic acid dihydrazide. In certain embodiments, the PglL glycan substrate is covalently linked to a modified carrier protein (directly or via a linker) through a chemical linkage obtainable using a chemical conjugation method selected from the group consisting of carbodiimide chemistry, reductive animation, cyanylation chemistry (for example CDAP chemistry), maleimide chemistry, hydrazide chemistry, ester chemistry, and N-hydroxysuccinimide chemistry. Conjugates can be prepared by direct reductive amination methods as described in, [76], [77]. Other methods are described in [78], [79], [80]. The conjugation method may alternatively rely on activation of the glycan with 1-cyano-4-dimethylamino pyridinium tetrafluoroborate (CDAP) to form a cyanate ester. Such conjugates are described in [81], [82], [83]. See also [84].

[0352] The glycosylated protein (i.e., conjugate) can then be purified, and optionally characterized, by techniques known in to art (see, e.g., [4], [72]; see also [8], [9], [10], [11]).

[0353] Conjugates

[0354] The O-glycosylated modified carrier proteins of the present invention can be used as therapeutic agents for the treatment of a number of diseases where an effective amount of the O-glycosylated modified carrier protein is administered to a subject in need of such treatment. The O-glycosylated modified carrier proteins of the present invention can also be used as a vaccine or in an immunogenic composition for the prevention of a disease when an effective amount of the O-glycosylated modifiec carriier protein is administered to a subject in need of such treatment. Thus, the methods described herein for producing of a number of different O-glycosylated modified crrier proteins will prove very useful in vaccinology.

[0355] “Homogeneity” means the variability of glycan length and possibly the number of glycosylation sites. Methods listed above can be used for this purpose. SE-HPLC allows the measurement of the hydrodynamic radius. Higher numbers of glycosylation sites in the carrier lead to higher variation in hydrodynamic radius compared to a carrier with less glycosylation sites. However, when single glycan chains are analyzed, they may be more homogenous due to the more controlled length. Glycan length is measured by hydrazinolysis, SDS PAGE, and CGE. In addition, homogeneity can also mean that certain glycosylation site usage patterns change to a broader/narrower range. These factors can be measured by Glycopeptide LC-MS/MS.

[0356] “Bioconjugate homogeneity” means the homogeneity of the attached sugar residues and can be assessed using methods that measure glycan length and hydrodynamic radius.

[0357] “Yield” is measured as carbohydrate amount derived from a liter of bacterial production culture grown in a bioreactor under controlled and optimized conditions. After purification of bioconjugate, the carbohydrate yields can be directly measured by either the anthrone assay or ELISA using carbohydrate specific antisera. Indirect measurements are possible by using the protein amount (measured by BCA, Lowry, or bardford assays) and the glycan length and structure to calculate a theoretical carbohydrate amount per gram of protein. In addition, yield can also be measured by drying the glycoprotein preparation from a volatile buffer and using a balance to measure the weight.

[0358] Analytical Methods

[0359] Various methods can be used to analyze the glycans and conjugates of the invention including, for example, SDS-PAGE or capillary gel electrophoresis. O-antigen polymer length is defined by the number of repeat units that are linearly assembled. This means that the typical ladder like pattern is a consequence of different repeat unit numbers that compose the glycan. Thus, two bands next to each other in SDS PAGE (or other techniques that separate by size) differ by only a single repeat unit. These discrete differences are exploited when analyzing glycoproteins for glycan size: the unglycosylated carrier protein and the bioconjugate with different polymer chain lengths separate according to their electrophoretic mobilities. The first detectable repeat unit number (n₁) and the average repeat unit number (n_{average}) present on a bioconjugate are measured. These parameters can be used to demonstrate batch to batch consistency or polysaccharide stability, for example.

[0360] In another embodiment, high mass MS and size exclusion HPLC could be applied to measure the size of the complete bioconjugates.

[0361] In another embodiment, an anthrone-sulfuric acid assay can be used to measure polysaccharide yields. See [85]. In another embodiment, a Methylpentose assay can be used to measure polysaccharide yields. See, e.g. [86].

[0362] Glycosylation Site Usage

[0363] Glycosylation site usage may be quantified by, for example, glycopeptide LC-MS/MS: conjugates are digested with protease(s), and the peptides are separated by a suitable chromatographic method (C18, Hydrophilic interaction HPLC HILIC, GlycoSepN columns, SE HPLC, AE HPLC), and the different peptides are identified using MS/MS. This method can be used with our without previous sugar chain shortening by chemical (smith degradation) or enzymatic methods. Quantification of glycopeptide peaks using UV detection at 215 to 280 nm allow relative determination of glycosylation site usage. In another embodiment, by size exclusion HPLC: Higher glycosylation site usage is reflected by a earlier elution time from a SE HPLC column.

[0364] Compositions

[0365] Compositions comprising a modified carrier protein are provided. In certain embodiments, the modified carrier protein is O-glycosylated. In certain embodiments, the glycan operably linked to the modified carrier protein is immunogenic and the composition is therefore an immunogenic composition.

[0366] An “immunogenic composition”, “vaccine composition,” or “pharmaceutical composition” is a preparation formulated to permit the biological activity of the active ingredient to be effective, and which contains no additional components which are unacceptably toxic to a subject to which the composition would be administered. Immunogenic, vaccine, or pharmaceutical compositions comprise pharmaceutical-grade active ingredients (e.g., pharmaceutical-grade antigen), therefore, the immunogenic, vaccine, or pharmaceutical compositions of the present invention are distinguished from any, e.g., naturally occurring composition. See [87]. In certain embodiments, the immunogenic, vaccine, or pharmaceutical composition is sterile. In certain embodiments, the composition is an immunogenic composition comprising an “immunogenic conjugate” (e.g., a modified carrier protein covalently linked to an immunogenic glycan). In certain embodiments, the immunogenic glycan is an O-antigen. Immunogenic compositions comprise an immunologically effective amount of the immunogenic glycan or immunogenic conjugate. An “immunologicaly effective amount” may be administered to an individual as a single dose or as part of a series. In certain embodiments, the immunogenic composition further comprises a pharmaceutically acceptable adjuvant, excipient, carrier, or diluent. Adjuvants, excipients, carriers, and diluents do not themselves induce an antibody or immune response, but rather they provide the technical effect of eliciting or enhancing an antibody or immune response to an antigen (e.g., an immunogenic glycan).

[0367] In an embodiment, the immunogenic compositions of the invention are monovalent formulations. In other embodiments, the immunogenic compositions of the invention are multivalent formulations, e.g. bivalent, trivalent, and tetravalent formulations. For example, a multivalent formulation comprises two or more immunogenic modified carrier proteins (e.g., a first immunogenic O-glycosylated modified carrier protein comprising a first immunogenic glycan and an at least second immunogenic O-glycosylated modified carrier protein comprising a second immunogenic glycan, optionally further comprising a third immunogenic O-glycosylated modified carrier protein comprising a third immunogenic glycan). In further embodiments, a multivalent immunogenic composition comprises an O-glycosylated modified carrier protein directly or indirectly attached to two or more distinct immunogenic glycans.

[0368] Also provided is a method of making an immunogenic composition comprising the step of mixing an immunogenic conjugate of the invention (e.g., an O-glycosylated modified carrier protein comprising an immunogenic glycan) with a pharmaceutically acceptable adjuvant, excipient, or diluent.

[0369] Provided are methods of inducing an antibody response in a mammal (e.g., a human mammal), comprising administering to the mammal an immunologically effective amount of an immunogenic composition of the present invention. Also provided are immunogenic compositions for use in inducing an antibody or immune response in a mammal. Provided are immunogenic compositions for the manufacture of a medicament for inducing an antibody or immune response in a mammal.

[0370] Streptococcus pneumoniae is a globally important encapsulated human pathogen. Streptococcus pneumoniae (S. pneumoniae, pneumococcus) is a Gram-positive bacterium responsible for considerable morbidity and mortality (particularly in infants and the elderly), causing invasive diseases such as bacteraemia and meningitis, pneumonia and other non-invasive diseases, such as acute otitis media. The major clinical syndromes caused by S. pneumoniae are widely recognized and discussed in standard medical textbooks. For instance, Invasive Pneumococcal Disease (IPD) is defined as any infection in which S. pneumoniae is isolated from the blood or another normally sterile site. Provided herein are immunogenic compositions for use in the treatment or prevention of a disease caused by Streptococcus pneumoniae infection, e.g. pneumonia, invasive pneumococcal disease (IPD), exacerbations of chronic obstructive pulmonary disease (eCOPD), otitis media, meningitis, bacteraemia, pneumonia and/or conjunctivitis. Provided are immunogenic compositions for use in inducing an immune response against a Streptococcus pneumoniae glycan in a mammal. Also provided are immunogenic compositions for inducing an antibody or immune response against a Streptococcus pneumoniae glycan in a mammal. Provided are immunogenic compositions for the manufacture of a medicament for inducing an antibody or immune response against a Streptococcus pneumoniae glycan in a mammal.

[0371] The disease caused by Streptococcus pneumoniae infection may be selected from pneumonia, invasive pneumococcal disease (IPD), exacerbations of chronic obstructive pulmonary disease (eCOPD), otitis media, meningitis, bacteraemia, pneumonia and/or conjunctivitis. Where the human mammal is an infant (defined as 0-2 years old in the context of the present invention), the disease may be selected from otitis media, meningitis, bacteraemia, pneumonia and/or conjunctivitis. In one aspect, where the human mammal is an infant (defined as 0-2 years old in the context of the present invention), the disease is selected from otitis media and/or pneumonia. Where the human mammal is elderly (i.e., 50 years or over in age, typically over 55 years and more generally over 60 years), the disease may be selected from pneumonia, invasive pneumococcal disease (IPD), and/or exacerbations of chronic obstructive pulmonary disease (eCOPD). In one aspect, where the human mammal is elderly, the disease is invasive pneumococcal disease (IPD). In another aspect, where the human mammal is elderly, the disease is exacerbations of chronic obstructive pulmonary disease (eCOPD).

[0372] Adjuvants

[0373] Adjuvants are non-antigen components used in immunogenic and vaccine compositions in order to enhance and modulate the immune or antibody response to the antigen. It is well recognized that an adjuvant enhances the induction, magnitude, and/or longevity of an antigen's immunological effect. An adjuvant is a compound that, when the compound is administered alone, does not generate an immune or antibody response to the antigen.

[0374] Immunogenic and vaccine compositions of the invention may comprise an adjuvant in addition to the antigen. In certain embodiments, the adjuvant is pharmaceutical-grade. An adjuvant may be administered before, concomitantly with, or after administration of an immunogenic or vaccine composition.

[0375] Specific examples of adjuvants include, but are not limited to, aluminum salts (alum) (such as aluminum hydroxide, aluminum phosphate, and aluminum sulfate), 3 De-O-acylated monophosphoryl lipid A (MPL), MF59, AS03, AS04, polysorbate 80 (TWEEN 80), imidazopyridine compounds (see [88]), imidazoquinoxaline compounds (see [89]), CpG ([90]) or unmethylated CpG containing oligonucleotides [91]), and saponins, such as QS21 (see [92]). In some embodiments, the adjuvant is Freund's adjuvant (complete or incomplete). Other adjuvants are oil in water emulsions (such as squalene or peanut oil), optionally in combination with immune stimulants, such as monophosphoryl lipid A (see [93]). In certain embodiments, the adjuvant is an oil-in-water emulsion (for example MF59, and AS03), liposomes (e.g., 3-o-desacyl-4′-Monophosphoryl Lipid A (MPL)) and/or saponins (e.g., QS21) (e.g., AS01), TLR2 agonist, TLR3 agonist, TLR4 agonist, TLR5 agonist, TLR6 agonist, TLR7 agonist, TLR8 agonist, TLR9 agonist, aluminium salt, nanoparticle, microparticle, ISCOMS, calcium fluoride, organic compound composite, or combinations thereof. See, e.g., [94], [95], and [96]). In a particular embodiment, the immunogenic or vaccine composition of the invention comprises an antigen and an adjuvant wherein the adjuvant is an oil-in-water emulsion (e.g., MF59, and AS03 and their respective subtypes including subtypes B and E), an aluminum salt (e.g., aluminum phosphate and aluminum hydroxide), a liposome, a saponin (e.g. QS21), an agonist of Toll-like receptors (TLRa) (e.g., TLR4a and TLR7a), or a combination thereof (e.g., Alum-TLR7a ([97]). By “TLR agonist” it is meant a component which is capable of causing a signaling response through a TLR signaling pathway, either as a direct ligand or indirectly through generation of endogenous or exogenous ligand ([98]). A TLR4 agonist, for example, is capable of causing a signalling response through a TLR-4 signalling pathway. A suitable example of a TLR-4 agonist is a lipopolysaccharide, suitably a non-toxic derivative of lipid A, particularly monophosphoryl lipid A or more particularly 3-Deacylated monophoshoryl lipid A (3D-MPL). In certain embodiments, the immunogenic or vaccine composition comprises one or more adjuvants.

[0376] In certain embodiments, the adjuvant is Monophosphoryl lipid A (such as 3-de-O-acylated monophosphoryl lipid A (3D-MPL)) or a derivative thereof, or a combination of monophosphoryl lipid A together with either an aluminium salt (e.g., aluminium phosphate or aluminium hydroxide) or an oil-in-water emulsion. In certain embodiments, the adjuvant comprises a formulation of QS21, 3D-MPL and tocopherol in an oil in water emulsion ([99]).

[0377] Excipients

[0378] Pharmaceutically acceptable excipients can be selected by those of skill in the art. For example, a pharmaceutically acceptable excipient may be a buffer, such as Tris (trimethamine), phosphate (e.g. sodium phosphate, sucrose phosphate glutamate), acetate, borate (e.g. sodium borate), citrate, glycine, histidine and succinate (e.g. sodium succinate), suitably sodium chloride, histidine, sodium phosphate or sodium succinate. A pharmaceutically acceptable excipient may include a salt, for example sodium chloride, potassium chloride or magnesium chloride. Optionally, a pharmaceutically acceptable excipient contains at least one component that stabilizes solubility and/or stability. Examples of solubilizing/stabilizing agents include detergents, for example, laurel sarcosine and/or polysorbate (e.g. TWEEN 80 (Polysorbate-80)). Examples of stabilizing agents also include poloxamer (e.g. poloxamer 124, poloxamer 188, poloxamer 237, poloxamer 338 and poloxamer 407). A phamaceutically acceptable excipient may include a non-ionic surfactant, for example polyoxyethylene sorbitan fatty acid esters, TWEEN 80 (Polysorbate-80), TWEEN 60 (Polysorbate-60), TWEEN 40 (Polysorbate-40) and TWEEN 20 (Polysorbate-20), or polyoxyethylene alkyl ethers (suitably polysorbate-80). Alternative solubilizing/stabilizing agents include arginine, and glass forming polyols (such as sucrose, trehalose and the like). A pharmaceutically excipient may be a preservative, for example phenol, 2-phenoxyethanol, or thiomersal. Other pharmaceutically acceptable excipients include sugars (e.g. lactose, sucrose), and proteins (e.g. gelatine and albumin). Pharmaceutically acceptable excipients for use with the present invention include saline solutions, aqueous dextrose and glycerol solutions (also referred to as “carriers” or “fillers” in the art). Numerous pharmaceutically acceptable excipients are described, for example, in [100].

[0379] Immunogenic compositions if the invention may also comprise diluents such as saline, and glycerol. Additionally, immunogenic compositions may comprise auxiliary substances such as wetting agents, emulsifying agents, pH buffering substances, and/or polyols.

[0380] Immunogenic compositions if the invention may also comprise one or more salts, e.g. sodium chloride, calcium chloride, sodium phosphate, monosodium glutamate, and aluminum salts (e.g. aluminum hydroxide, aluminum phosphate, alum (potassium aluminum sulfate), or a mixture of such aluminum salts).

[0381] Immunogenic compositions if the invention may also comprise a preservative, e.g. a mercury derivative thimerosal or 2-phenoxyethanol. In an embodiment, the immunogenic composition of the invention comprises 0.001% to 0.01% thimerosal. In an embodiment, the immunogenic composition of the invention comprises 0.001% to 0.01% 2-phenoxyethanol.

[0382] Immunogenic compositions if the invention may also comprise a detergent e.g. polysorbate, such as TWEEN 80 (Polysorbate 80). Detergents may be present at low levels e.g. <0.01%, but higher levels have been suggested for stabilising antigen formulations e.g. up to 10%.

[0383] Administration

[0384] Immunogenic compositions or vaccines of the invention may be used to induce an immune or antibody response and/or protect or treat a mammal susceptible to infection, by administering said immunogenic composition or vaccine composition to said mammal via systemic or mucosal route. These administrations may include injection via the intramuscular (IM), intraperitoneal, intradermal (ID) or subcutaneous routes; or via mucosal administration to the oral/alimentary, respiratory, genitourinary tracts. For example, intranasal (IN) administration may be used. Although the immunogenic composition or vaccine of the invention may be administered as a single dose, components thereof may also be co-administered together at the same time or at different times. For co-administration, the optional adjuvant, for example, may be present in any or all of the different administrations, however in one particular aspect of the invention it is present in combination with the immunogenic O-glycosylated modified carrier protein. In addition to a single route of administration, two different routes of administration may be used. Following an initial vaccination, subjects may receive one or several booster immunizations adequately spaced.

### EXAMPLES

[0385] It is understood that the examples and embodiments described herein are for illustrative purposes only and that various modifications or changes in light thereof will be suggested to persons skilled in the art and are to be included within the spirit and purview of this application.

### Example 1

### Materials and Methods

[0386] Escherichia coli deficient in O-antigen lipopolysaccharide ligase gene waaL (E. coli W3110 ΔwaaL, ΔwecA-wzzE, ΔO16::wbgT-wbgZ cluster of P. shigelloides O17 (S. sonnei) (“E. coli W3110ΔwaaL” hereafter)) containing a chromosomal copy of a polysaccharide biosynthesis cluster (0-antigen or capsular polysaccharide) as well as two plasmids expressing PglL and a modified carrier protein was used. A single colony was inoculated in 50 ml TBdev medium [yeast extract 24 g/L, soy peptone 12 g/L, glycerol 100% 4.6 mL/L, K₂HPO₄ 12.5 g/L, KH₂PO₄ 2.3 g/L, MgCl₂x6H₂O 2.03 g/L) and grown at 30° C. to an OD of 0.8. At this point, 0.1 mM IPTG and 0.1% arabinose were added as inducers. The culture was further incubated o/n and harvested for further analysis (see [00119]). In case of bioreactor evaluation, a 50 mL (uninduced) o/n culture was used to inoculate a 11 culture in a 21 bioreactor. The bioreactor was stirred with 500-1000 rpm, pH was kept at 7.2 by auto-controlled addition of either 2 M KOH or 20% H₃PO₄ and the cultivation temperature was set at 30° C. The level of dissolved oxygen (pO2) was kept at 10% oxygen. In batch phase cells were grown in a TBdev medium as described above but containing glycerol at 50 g/L. As feed medium TBdev supplemented with 250 g/L glycerol and 0.1% IPTG (one-plasmid system) or 0.1% IPTG and 2.5% arabinose (two-plasmid system) was used. Induction with 0.1 mM IPTG (one-plasmid system) and 0.1 mM IPTG and 0.1% arabinose (2-plasmid system) was done at OD=35, prior to starting the fed-batch phase of growth. A linear feed rate was sustained for 24 h, followed by a 16 h starvation period. The bioreactor culture was harvested after a total of ≈40 h cultivation, when it should have reached an OD600 of 80.

[0387] The production process was analyzed by Coomassie brilliant blue staining or Western blot as described previously ([101]). After being blotted on nitrocellulose membrane, the sample was immunostained with the either anti-His, anti-glycan or anti-carrier-protein. Anti-rabbit IgG-HRP (Biorad) was used as secondary antibody. Detection was carried out with ECL™ Western Blotting Detection Reagents (Amersham Biosciences, Little Chalfont Buchinghamshire).

[0388] For periplasmic protein extraction, the cells were harvested by centrifugation for 20 min at 10,000 g and resuspended in 1 volume 0.9% NaCl. The cells were pelleted by centrifugation during 25-30 min at 7,000 g. The cells were resuspended in Suspension Buffer (25% Sucrose, 100 mM EDTA 200 mM Tris HCl pH 8.5, 250 OD/ml) and the suspension was incubated under stirring at 4-8° C. during 30 min. The suspension was centrifuged at 4-8° C. during 30 min at 7,000-10,000 g. The supernatant was discarded, the cells were resuspended in the same volume ice cold 20 mM Tris HCl pH 8.5 and incubated under stirring at 4-8° C. during 30 min. The spheroblasts were centrifuged at 4-8° C. during 25-30 min at 10,000 g, the supernatant was collected and passed through a 0.2 g membrane. Periplasmic extract was loaded on a 7.5% SDS-PAGE, and stained with Coomasie for identification.

[0389] For bioconjugate purification, the supernatant containing periplasmic proteins obtained from 100,000 OD of cells was loaded on a Source Q anionic exchange column (XK 26/40≈180 ml bed material) equilibrated with buffer A (20 mM Tris HCl pH 8.0). After washing with 5 column volumes (CV) buffer A, the proteins were eluted with a linear gradient of 15 CV to 50% buffer B (20 mM Tris HCl+1M NaCl pH 8.0) and then 2 CV to 100% buffer B. Protein were analyzed by SDS-PAGE and stained by Coomassie. Bioconjugate may elute at conductivity between 6-17 mS. The sample was concentrated 10 times and the buffer was exchanged to 20 mM Tris HCl pH 8.0.

[0390] Bioconjugate was loaded on a Source Q column (XK 16/20˜28 ml bed material) equilibrated with buffer A: 20 mM Tris HCl pH 8.0. The identical gradient that was used above was used to elute the bioconjugate. Protein were analyzed by SDS-PAGE and stained by Coomassie. Normally the bioconjugate elutes at conductivity between 6-17 mS. The sample was concentrated 10 times and the buffer was exchanged to 20 mM Tris HCl pH 8.0.

[0391] Bioconjugate was loaded on Superdex 200 (Hi Load 26/60, prep grade) that was equilibrated with 20 mM Tris HCl pH 8.0. Protein fractions from Superdex 200 column were analyzed by SDS-PAGE and stained by Coomassie stained.

[0392] Bioconjugates from different purification steps were analyzed by SDS-PAGE and stained by Coomassie. Bioconjugate is purified to more than 98% purity using the process. Bioconjugate can be successfully produced using this technology.

### Carrier Protein Optimization

[0393] Pseudomonas exotoxin A (EPA) carrier protein (SEQ ID NO: 1) was modified to incorporate one or more GlycoTags from Neisseria meningitidis pilin PilE (wild type sequence provided as SEQ ID NO: 137) (for methods see [29]; [6]; [4]; and [31], all incorporated herein by reference in their entireties). Recombinant EPA (rEPA, SEQ ID NO: 1) was modified to make three other recombinant EPA proteins:
[0394] the first having been modified to incorporate, at its N-terminus, the NmPilE GlycoTag SEQ ID NO: 140 (corresponding to residues 45-73 of SEQ ID NO: 137); twenty-nine (29) amino acid long) (rEPA1, SEQ ID NO: 51).
[0395] The second having been modified to incorporate, at internal residue A375 with respect to SEQ ID NO: 1 ( ), the NmPilE GlycoTag SEQ ID NO: 140 (rEPA2, SEQ ID NO: 53).
[0396] The third having been modified to incorporate, at its C-terminus, the NmPilE GlycoTag SEQ ID NO: 140 (rEPA3, SEQ ID NO: 55).

### Technical Feasibility

[0397] Neisseria meningitidis PglL (NmPglL) (polynucleotide sequence SEQ ID NO 8, encoding amino acid sequence SEQ ID NO: 9), Shigella sonnei O-antigen gene cluster (polynucleotide sequence SEQ ID NO: 6, encoding amino acid sequences SEQ ID NO: 208-216), and one of carrier proteins rEPA1, rEPA2, and rEPA3 (operatively linked to a DsbA periplasmic signal sequence (SEQ ID NO: 5, encoding SEQ ID NO: 4)) were introduced into Escherichia coli W3110 deficient in O-antigen lipopolysaccharide ligase gene waaL (E. coli W3110ΔwaaL). Three cell lots were made, one for each of rEPA1-rEPA3. Coomassie blue staining and Western blot assays confirmed that NmPglL efficiently transferred lipid-carrier-linked S. sonnei O-antigen to each of rEPA1, rEPA2, and rEPA3 (corresponding to #1-#4, respectively, in FIG. 2). Transfer was observed in either one plasmid systems (i.e. PglL and rEPA carrier combined in one plasmid (#1-#3 FIG. 2A and FIG. 2B) or in a two plasmid system (i.e. PglL and EPA encoded on two separate plasmids, IPTG and arabinose inducible (#4 FIG. 2A and FIG. 2B). Mass spectrometry confirmed that, when bound to rEPA1, the S. sonnei O-antigen is intact and its structure maintained. Twenty-one (21) to twenty-five (25) repeat units (below) have been determined to be attached to the rEPA1.

[chemical structure]

[0398] The stability of the rEPA1-S. sonnei O-antigen bioconjugate was studied at three different temperatures (−80° C., 2-8° C., and room temperature (RT) 20-25° C.) for a time of six months. Additionally, five freeze/thaw cycles (5 FT) on purified rEPA1-S. sonnei O-antigen were performed. SEC-HPLC readouts of samples taken at zero months, two weeks, one month, three months, and six months revealed that the rEPA1-S. sonnei O-antigen bioconjugate peak area was constant over time FIG. 3. The same was observed for the sample subjected to five freeze/thaw cycles. No degradation products were observed and only minor aggregation was observed. The bioconjugate had good stability overtime. FIG. 3.

### Immunogenicity

[0399] To evaluate the immunogenicity of the rEPA1-S. sonnei O-antigen bioconjugate, four female New Zealand White Rabbits (age 3-4 months) were divided into two groups (two rabbits per group) and subcutaneously injected at zero, seven, ten, and eighteen days with a bioconjugate composition comprising 2 μg of sugar, 40 μg of protein, and non-Freund's adjuvant (Group 1) or 10 μg of sugar, 200 μg of protein, and non-Freund's adjuvant (Group 2). Bleeds occurred at zero, twenty-one, and twenty-eight days. Western blot of the blood samples taken at twenty-eight days revealed that antibodies against S. sonnei O-antigen and EPA were generated in all subjects (FIG. 4), with the 2 μg dose (FIG. 4A) inducing a better antibody response than the 10 μg dose (FIG. 4B). These results show that the NmPglL mediated rEPA1-S. sonnei O-antigen bioconjugate is immunogenic in rabbits.

### Example 2

### Carrier Protein Versatility

[0400] To evaluate the technical feasibility of using multiple GlycoTags on the carrier protein, EPA was modified to incorporate either one or two copies of the NmPilE GlycoTag having the sequence SEQ ID NO: 9. For EPA incorporating only one copy of the GlycoTag, it was located at the N-terminus (rEPA1). For EPA incorporating two copies of the GlycoTag SEQ ID NO: 140, the first GlycoTag was located at the N-terminus and the second was located at the C-terminus (rEPA43, SEQ ID NO: 135). Neisseria meningitidis PglL (NmPglL) was applied to rEPA1 or rEPA43 in the presence of one of three distinct lipid-carrier-linked polysaccharides: S. sonnei O-antigen, S. flexneri 2a CPS, or Streptococcus pneumoniae 12F CPS. NmPglL transferred each of S. sonnei O-antigen, S. flexneri 2a CPS, and Streptococcus pneumoniae 12F CPS onto rEPA1 and rEPA43 (FIG. 5).

[0401] These results show that a carrier protein modified to incorporate more than one GlycoTag may be used for in vivo bioconjugation.

[0402] To evaluate the versatility of NmPglL toward carrier protein, known carrier proteins AcrA, PcrV, and Crm197 were also modified as above to incorporate one copy of the NmPilE GlycoTag having the sequence SEQ ID NO: 140. For modified AcrA (mAcrA), a pelB signal sequence (residues 1-22 of SEQ ID NO: 198) was operably linked to the N-terminus of the AcrA sequence, the GlycoTag SEQ ID NO: 140 was operably linked to the C-terminus of AcrA, and a 6×His-tag was operably linked to the C-terminus of the GlycoTag (SEQ ID NO: 199 for mAcrA). For modified PcrV (mPcrV), a LtIIb signal sequence (residues 1-23 of SEQ ID NIO: 202) was operably linked to the N-terminus of the PcrV sequence, the GlycoTag SEQ ID NO: 140 was operably linked to the C-terminus of PcrV, and a 6×His-tag was operably linked to the C-terminus of the GlycoTag (SEQ ID NO: 202 for mPcrV). For a first modified Crm197 (mCrm197), a DsbA signal sequence (SEQ ID NO: 4) was operably linked to the N-terminus of the Crm197 sequence, the GlycoTag SEQ ID NO: 140 was operably linked to the C-terminus of Crm197, and a 6×His-tag was operably linked to the C-terminus of the GlycoTag (SEQ ID NO: 204 for mCrm197). For a second modified Crm197 (m2Crm197, SEQ ID NO: 207), a DsbA signal sequence (SEQ ID NO: 4) was operably linked to the N-terminus of the GlycoTag sequence SEQ ID NO: 140, which were together operably linked to the N-terminus of the Crm197 sequence; the GlycoTag SEQ ID NO: 140 was also operably linked to the C-terminus of Crm197, and a 6×His-tag was operably linked to the C-terminus of the GlycoTag (see m2Crm197 sequence SEQ ID NO: 207). NmPglL, S. sonnei O-antigen, and one of mAcrA, mPcrV, mCrm197, and m2Crm197 were operatively introduced into E. coli W3110ΔwaaL. In this way, NmPglL contacted lipid-carrier-linked S. sonnei O-antigen in the presence of mAcrA, mPcrV, mCrm197, or m2Crm197. NmPglL transferred S. sonnei O-antigen onto mAcrA, mPcrV, mCrm197, and m2Crm197 (FIG. 6).

### PglL Substrate Versatility

[0403] To evaluate the substrate versatility of NmPglL, a polysaccharide gene cluster (i.e., nucleotide sequence) encoding a Pneumococcal capsular polysaccharide (CPSs) from one of each of serotypes Sp8, Sp12F, Sp14, Sp22A, Sp23A, and Sp33F was chromosomally introduced (Table 1) into E. coli W3110ΔwaaL. NmPglL, and rEPA1 or rEPA43 nucleotide sequences (Example 1 above) were also operatively introduced into each of the E. coli W3110ΔwaaL cells. Twelve recombinant host cells were made, six incorporating one of each of the six different Pneumococcal CPSes and rEPA1, and another six incorporating one of each of the six different Pneumococcal CPSes and rEPA43. In this way, NmPglL contacted each lipid-carrier-linked Pneumococcal CPS peptidoglycan in the presence of rEPA1 or rEPA43, and NmPglL transferred Pneumococcal CPS glycan onto rEPA1 or rEPA43 in vivo:

TABLE 1

| Serotype | Reducing End Structure | | Transfer |
|---|---|---|---|
| Sp8 | [chemical structure] | Glucuronic acid-β1,4- glucose-UndPP | + |
| Sp12F | [chemical structure] | N-acetyl-fucosamine- α1,3-N-acetyl- galactosamine-UndPP | +++ |
| Sp14 | [chemical structure] | Galactose-β1,4- glucose-UndPP | + |
| Sp15A | [chemical structure] | Galactose-β1,4- glucose-UndPP | − |
| Sp22A | [chemical structure] | Rhamnose-β1,4- glucose-UndPP | + |
| Sp23A | [chemical structure] | Rhamnose-β1,4- glucose-UndPP | + |
| Sp33F | [chemical structure] | Galactofuranose-β1,3- glucose-UndPP | ++ |

+) transfer detected
++) good transfer
+++) efficient transfer

[0404] The results with respect to Pneumococcal Sp15A CPS were inconclusive because no transfer of Sp15A CPS was detected, but transfer of Pneumococcal Sp14 CPS was detected and both Sp15A and Sp14 CPSes have the reducing end structure Galactose-β1,4-Glucose-UndPP. NmPglL transferred onto rEPA1 and rEPA43 all of the Pneumococcal serotype 8, 12F, 14, 22A, 23A, and 33F glycans (having reducing end structures Glucuronic acid-β1,4-glucose (Sp8), N-acetyl-fucosamine-α1,3-N-acetyl-galactosamine (Sp12F), Galactose-β1,4-glucose (Sp14), Rhamnose-β1,4-glucose (Sp22A, Sp23A), and Galactofuranose-β1,3-glucose (Sp33F), respectively). These results confirm that NmPglL glycan substrates include those having glucose or GalNAc at its reducing end (also supported by Faridmoayer et al. ([3]).

### Example 3

### Identification and Characterization of Neisseria meningitidis PglL Homologues

[0405] Twenty Neisseria PglL proteins were identified, each from different Neisseria species. Using established methods, each PglL was first screened for its ability to transfer the S. sonnei O-antigen (made by the operon consisting of the wbgT, wbgU, wzx, wxy, wbgV, wbgW, wbgX, wbgY, and wbgZ genes, encoding proteins of SEQ ID NOs: 208-216, which make a saccharide with a reducing end structure N-acetyl-altruronic acid-α1,3-4-amino-N-acetyl-fucosamine)7 onto an endogenous pilin and with an efficiency that was at least comparable to (i.e., equal to or greater than) that of NmPglL (control). Six Neisseria meningitidis PglL homologues were thereby identified. The six Neisseria PglL proteins were then each screened for its ability to transfer the S. sonnei O-antigen onto rEPA1 and with an efficiency that was at least comparable to NmPglL (control). Four Neisseria meningitidis PglL homologues were thereby identified. For methods see [4], [6], [29], and [31], all incorporated herein by reference in their entireties. The results were as summarized in Table 2 below:

TABLE 2

| | | | RESULTS: | RESULTS: |
|---|---|---|---|---|
| | | | At least comparable | At least comparable |
| | | | transfer of S. sonnei | transfer of S. sonnei |
| | | | O-antigen onto an | O-antigen onto |
| | | Endogenous | endogenous pilin (as | rEPA1 (as |
| | PglL | Pilin | compared to NmPglL | compared to NmPglL |
| | SEQ ID NO: | SEQ ID NO: | transfer onto NmPilE)? | transfer onto rEPA1)? |
| Neisseria meningitidis(control) | 9 | 138 | Control | Control |
| | (NmPglL) | | | |
| Neisseria gonorrhoeae | 11 | 143 | Yes | Yes |
| | (NgPglL) | | | |
| Neisseria lactamica 020-06 | 13 | 148 | Yes | Yes |
| | (NlPglL) | | | |
| Neisseria lactamica ATCC 23970 | 15 | 165 | — | — |
| Neisseria gonorrhoeae F62 | 17 | 166 | — | — |
| Neisseria cinerea ATCC 14685 | 19 | 167 | — | — |
| Neisseria cinerea ATCC 14685 | 19 | 168 | — | — |
| Neisseria mucosa | 21 | 169 | — | — |
| Neisseria mucosa | 21 | 170 | — | — |
| Neisseria flavescens NRL30031/H210 | 23 | 171 | — | — |
| Neisseria mucosa ATCC 25996 | 25 | 172 | Yes | — |
| | (NmuPglL) | | | |
| Neisseria mucosa ATCC 25996 | 25 | 173 | Yes | — |
| | (NmuPglL) | | | |
| Neisseria sp. oral taxon 014 | 27 | 174 | — | — |
| strain F0314 | | | | |
| Neisseria sp. oral taxon 014 | 27 | 175 | — | — |
| strain F0314 | | | | |
| Neisseria arctica | 29 | 176 | — | — |
| Neisseria shayeganii 871 | 31 | 177 | — | — |
| | (Ns2PglL) | | | |
| Neisseria shayeganii 871 | 33 | 177 | Yes | — |
| | (NsPglL) | | | |
| Neisseria shayeganii 871 | 33 | 178 | Yes | — |
| | (NsPglL) | | | |
| Neisseria sp. 83E34 | 35 | 181 | — | — |
| Neisseria sp. 83E34 | 35 | 182 | — | — |
| Neisseria wadsworthii | 37 | 183 | — | — |
| Neisseria wadsworthii | 37 | 184 | — | — |
| Neisseria elongata subsp. glycolytica | 39 | 185 | Yes | Yes |
| ATCC 29315 | (NePglL) | | | |
| Neisseria elongata subsp. glycolytica | 39 | 186 | Yes | Yes |
| ATCC 29315 | (NePglL) | | | |
| Neisseria bacilliformis ATCC | 41 | 187 | Yes | Yes |
| BAA-1200 | (NbPglL) | | | |
| Neisseria bacilliformis ATCC | 41 | 188 | Yes | Yes |
| BAA-1200 | (NbPglL) | | | |
| Neisseria sp. oral taxon 020 str. F0370 | 43 | 190 | — | — |
| Neisseria sp. oral taxon 020 str. F0370 | 43 | 191 | — | — |
| Neisseria sp. 74A18 PglL | 45 | 192 | — | — |
| Neisseria sp. 74A18 PglL | 45 | 193 | — | — |
| Neisseria weaver ATCC 51223 | 47 | 194 | — | — |
| Neisseria macacae ATCC 33926 | 49 | 195 | — | — |
| Neisseria macacae ATCC 33926 | 49 | 196 | — | — |

[0406] NmPglL, Neisseria gonorrhoeae PglL (NgPglL), Neisseria lactamica 020-06 (NlPglL), Neisseria elongata subsp. glycolytica ATCC 29315 (NePglL), and Neisseria bacilliformis ATCC BAA-1200 (NbPglL) were shown to transfer the lipid-carrier-linked S. sonnei O-antigen onto the soluble NmPilE-based GlycoTag. For most, this was a glycan transfer onto a non-endogenous GlycoTag. These results indicate that NgPglL, NlPglL, Neisseria mucosa ATCC 25996 (NmuPglL), Neisseria shayeganii 871 (SEQ ID NO: 33) (NsPglL), NePglL, and NbPglL all transfer a lipid linked glycan substrate with a reducing end structure N-acetyl-fucosamine (FucNAc) (S-2 to S-1 structure being N-acetyl-altruronic acid-α1,3-4-amino-N-acetyl-fucosamine) onto its endogenous pilin or rEPA1 with an efficiency that is at least comparable to control (NmPglL). See also Example 8 below.

### Example 4

[0407] Designed Carrier Proteins with Internal NmPilE GlycoTag

[0408] Twenty-two modified EPA carrier proteins were designed and produced, each incorporating one copy, at an internal residue, of the NmPilE GlycoTag having the sequence SEQ ID NO: 140 (29 amino acid sequence corresponding to residues 45-73 of NmPilE sequence SEQ ID NO: 137). The below-listed EPA residues (numbered with respect to SEQ ID NO: 1) were substituted for the GlycoTag sequence SEQ ID NO: 140 (i.e., an insertion of 29 amino acids):

TABLE 3
Internal EPA residues substituted with GlycoTag SEQ ID NO: 140
(numbered with respect to SEQ ID NO: 1)

| | | |
|---|---|---|
| 1.) | A14 | (rEPA4, SEQ ID NO: 57) |
| 2.) | D36 | (rEPA5, SEQ ID NO: 59) |
| 3.) | Q92 | (rEPA6, SEQ ID NO: 61) |
| 4.) | G123 | (rEPA7, SEQ ID NO: 63) |
| 5.) | E157 | (rEPA8, SEQ ID NO: 65) |
| 6.) | A177 | (rEPA9, SEQ ID NO: 67) |
| 7.) | Y208 | (rEPA10, SEQ ID NO: 69) |
| 8.) | N231 | (rEPA11, SEQ ID NO: 71) |
| 9.) | E252 | (rEPA12, SEQ ID NO: 73) |
| 10.) | R274 | (rEPA13, SEQ ID NO: 75) |
| 11.) | A301 | (rEPA14, SEQ ID NO: 77) |
| 12.) | Q307 | (rEPA15, SEQ ID NO: 79) |
| 13.) | A365 | (rEPA16, SEQ ID NO: 81) |
| 14.) | S408 | (rEPA17, SEQ ID NO: 83) |
| 15.) | T418 | (rEPA18, SEQ ID NO: 85) |
| 16.) | A464 | (rEPA19, SEQ ID NO: 87) |
| 17.) | A519 | (rEPA20, SEQ ID NO: 89) |
| 18.) | G525 | (rEPA21, SEQ ID NO: 91) |
| 19.) | H533 | (rEPA22, SEQ ID NO: 93) |
| 20.) | S585 | (rEPA23, SEQ ID NO: 95) |
| 21.) | K240 | (rEPA24, SEQ ID NO: 97) |
| 22.) | A375 | (rEPA25, SEQ ID NO: 99) |

[0409] FIG. 7A (depicting EPA residues 1-20.) and FIG. 7B (depicting EPA residues 21.-22.).

[0410] To evaluate glycan transfer to a GlycoTag located within a carrier protein (i.e., an “Internal GlycoTag”), nucleotide sequences encoding NmPglL (SEQ ID NO: 9), S. sonnei O-antigen (SEQ ID NOs: 208-216), and one of each of rEPA4 to rEPA25 (operatively linked to a DsbA periplasmic signal sequence) were introduced into E. coli W3110ΔwaaL (full genotype E. coli W3110 ΔwaaL::pglLNm, ΔwecAwzzECA, ΔO16::wbgT-wbgZ cluster of P. shigelloides O17 Twenty-two different cell lots were made, one for each of rEPA4-rEPA25. Western blot assays confirmed that NmPglL efficiently transferred lipid-carrier-linked S. sonnei O-antigen to all of rEPA4-rEPA17, rEPA19-rEPA25 in vivo. In this experiment, results with respect to rEPA15 were inconclusive because rEPA18 expression was not observed. FIG. 8.

### Example 5

### Homologues of NmPglL Transfer Glycan to Endogenous-Pilin-Based GlycoTag

[0411] Homologues of Neisseria meningitidis pilin PilE were identified from Neisseria gonorrhoeae (NgPilin), Neisseria lactamica 020-06 (NiPilin), Neisseria elongate subsp. glycolytica ATCC 29315 (NePilin), and Neisseria bacilliformis ATCC BAA-1200 (NbPilin), Neisseria mucosa ATCC 25996 (NmuPilin), and Neisseria shayeganii 871 (NsPilin) (amino acid sequences SEQ ID NOs 143, 148, 153, 156, 159, and 162, respectively). See also the endogenous pilins in Example 3 and Table 2 above. GlycoTags from each of those pilin were designed.

[0412] Using established methods, EPA carrier protein (SEQ ID NO: 1) was modified to incorporate one copy of a GlycoTag from one of each of NgPilin, NlPilin, NePilin, NbPilin, NmuPilin, and NsPilin. Six recombinant EPA (rEPA) proteins were made:
[0413] The first EPA having been modified to incorporate, at its N-terminus, the NgPilin GlycoTag SEQ ID NO: 145 (corresponding to residues 52-81 of SEQ ID NO: 143; thirty (30) amino acid long) (rEPA26, SEQ ID NO: 101).
[0414] The second EPA having been modified to incorporate, at its N-terminus, the NlPilin GlycoTag SEQ ID NO: 150 (corresponding to residues 52-86 of SEQ ID NO: 148; thirty-five (35) amino acid long) (rEPA27, SEQ ID NO: 103).
[0415] The third EPA having been modified to incorporate, at its N-terminus, the NePilin GlycoTag SEQ ID NO: 154 (corresponding to residues 52-96 of SEQ ID NO: 153; fourth-five (45) amino acid long) (rEPA28, SEQ ID NO: 105).
[0416] The fourth EPA having been modified to incorporate, at its N-terminus, the NbPilin GlycoTag SEQ ID NO: 157 (corresponding to residues 57-93 of SEQ ID NO: 156; thirty-seven (37) amino acid long) (rEPA29, SEQ ID NO: 107).
[0417] The fifth EPA having been modified to incorporate, at its N-terminus, the NmuPilin GlycoTag SEQ ID NO: 160 (corresponding to residues 52-92 of SEQ ID NO: 159; fourty-one (41) amino acid long) (rEPA30, SEQ ID NO: 109).
[0418] The sixth EPA having been modified to incorporate, at its N-terminus, the NsPilin GlycoTag SEQ ID NO: 163 (corresponding to residues 53-83 of SEQ ID NO: 162; thirty-one (31) amino acid long) (rEPA31, SEQ ID NO: 111).

[0419] Western blot assays was used to determine whether NgPglL (SEQ ID NO: 11), NlPglL (SEQ ID NO: 13), NePglL (SEQ ID NO: 39), NbPglL (SEQ ID NO: 41), NmuPglL (SEQ ID NO: 25) (FIG. 9A) as well as NsPglL (SEQ ID NO: 33) (FIG. 9B) transfer lipid-carrier-linked S. sonnei O-antigen (SEQ ID NOs: 208-216) to carrier proteins containing an endogenous GlycoTag (i.e., to carrier protein rEPA26-rEPA31, respectively). These assays also tested whether NmPglL (SEQ ID NO: 9) can transfer S. sonnei O-antigen onto rEPA26-rEPA31 (FIG. 9A and FIG. 9B).

[0420] These results show that PglLs (NgPglL, NlPglL, and NsPglL) transfer a lipid-carrier-linked peptidoglycan having reducing end structure N-acetyl-fucosamine (FucNAc) (S-2 to S-1 structure being N-acetyl-altruronic acid-α1,3-4-amino-N-acetyl-fucosamine) onto a modified EPA carrier protein that has at its N-terminus, an endogenous GlycoTag. Of these three, NgPglL transferred S. sonnei O-antigen to rEPA26 more efficiently than NlPglL transferred S. sonnei O-antigen to rEPA27. Also, NlPglL transferred S. sonnei O-antigen to rEPA27 more efficiently than NsPglL transferred S. sonnei O-antigen to rEPA31. NmPglL also transferred S. sonnei O-antigen onto rEPA26, rEPA27 and rEPA31 FIG. 9A and FIG. 9B.

### Example 6

[0421] Designed Carrier Proteins Comprising Neisseria gonnorrhoeae GlycoTag(s)

[0422] Modified EPA carrier proteins were designed and produced, each incorporating one or two copies of a Neisseria gonorrhoeae Pilin GlycoTag sequence. Internal EPA residues R274, S408, and/or A519 (numbered with respect to SEQ ID NO: 1) were substituted for the NgPilin GlycoTag having the sequence SEQ ID NO: 145 or SEQ ID NO: 146 (30 amino acid sequence corresponding to residues 52-81 of NgPilin sequence SEQ ID NO: 143 and 20 amino acid sequence corresponding to residues 62-81 of NgPilin sequence SEQ ID NO: 143, respectively) (Table 4 below).

[0423] Using established methods, nucleotide sequences encoding Neisseria gonorrhoeae PglL (NgPglL) (SEQ ID NO: 11), Shigella sonnei O-antigen (SEQ ID NOs: 208-216), and one of each of rEPA32-rEPA39 (SEQ ID NOs: 113, 115 117, 119, 121, 123, 125, and 127, respectively, under DsbA periplasmic signal sequence) were operatively introduced into each of two E. coli W3110ΔwaaL host cell strains. Strain “st12807” has the NgPglL sequence integrated at the waaL locus and has genotype: W3110 ΔwaaL, ΔwecAwzzECA ΔO16::wbgT-wbgZ cluster of P. shigelloides O17, ΔwaaL::pglL_Neisseria_gonorrhoeae_CNT56492. Strain “st8774” does not have the NgPglL sequence integrated at the waaL locus and has genotype: W3110 ΔwaaL ΔwecAwzzECA ΔO16::wbgT-wbgZ cluster of P. shigelloides O17. Sixteen cell lots were made, one for each of rEPA32-rEPA39 in each of strains st12807 and st8774. For methods see [4], [6], [29], and [31], all incorporated herein by reference in their entireties. Western blot assays show that NgPglL efficiently transferred lipid-carrier-linked S. sonnei O-antigen to most of the modified EPAs in vivo (rEPA32, rEPA34, rEPA36-rEPA38), but inefficiently for two (rEPA33 and rEPA39), and not at all for one (rEPA35). FIG. 10A, FIG. 10B, and Table 4 below.

TABLE 4

| | | RESULTS: |
|---|---|---|
| | | NgPglL transfer |
| | | lipid-carrier- |
| Modification made to EPA carrier protein | | linked O-antigen |
| (SEQ ID NO: 1) | | onto rEPA#? |
| R274 substituted with SEQ ID | (rEPA32, | Yes, |
| NO: 145 | SEQ ID NO: 113) | efficiently |
| S408 substituted with SEQ ID | (rEPA33, | Yes, but |
| NO: 145 | SEQ ID NO: 115) | inefficiently |
| A519 substituted with SEQ ID | (rEPA34, | Yes, |
| NO: 145 | SEQ ID NO: 117) | efficiently |
| S408 substituted with SEQ ID | (rEPA35, | — |
| NO: 146 | SEQ ID NO: 119) | |
| A519 substituted with SEQ ID | (rEPA36, | Yes, |
| NO: 146 | SEQ ID NO: 121) | efficiently |
| R274 and S408 substituted with | (rEPA37, | Yes, |
| SEQ ID NO: 146 | SEQ ID NO: 123) | efficiently |
| R274 and A519 substituted with | (rEPA38, | Yes, |
| SEQ ID NO: 146 | SEQ ID NO: 125) | efficiently |
| S408 and A519 substituted with | (rEPA39, | Yes, but |
| SEQ ID NO: 146 | SEQ ID NO: 127) | inefficiently |

[0424] These results show that a modified EPA carrier protein having internal residues R274, or A519 substituted with either GlycoTag sequence SEQ ID NOs: 145 and 146 is efficient for in vivo O-glycosylation of the modified EPA via NgPglL. Also, a modified EPA carrier protein having both internal residues R274 and A519 substituted with GlycoTag sequence SEQ ID NO 146 is efficient for in vivo O-glycosylation of the modified EPA via NgPglL.

[0425] These results also show that a modified EPA carrier protein having internal residue S408 substituted with GlycoTag sequence SEQ ID NO: 145 works, but inefficiently, for in vivo O-glycosylation of the modified EPA via NgPglL This is interesting because, in other studies, a modified EPA carrier protein incorporating a NmGlycoTag at residue S408 was efficiently O-glycosylated by NmPglL (unpublished data).

[0426] A modified EPA carrier protein having internal residue S408 substituted with GlycoTag sequence SEQ ID NO: 146 did not work for in vivo O-glycosylation of the modified EPA via NgPglL.

### Example 7

### Systems Comparison

[0427] The abilities of NmPglL and NgPglL to transfer glycan to modified EPA carrier proteins comprising a NgPilin GlycoTag were compared. rEPA32, rEPA34, rEPA36, and rEPA38 from Example 6 were used as well as:

Modification made to EPA carrier protein
(SEQ ID NO: 1)

| | |
|---|---|
| SEQ ID NO: 145 introduced at | (rEPA40, |
| the N-terminus | SEQ ID NO: 129) |
| R274 substituted with SEQ ID | (rEPA41, |
| NO: 146 | SEQ ID NO: 131) |
| R274 and A519 substituted with | (rEPA42, |
| SEQ ID NO: 145 | SEQ ID NO: 133) |

[0428] Using established methods, a nucleotide sequence encoding NmPglL (SEQ ID NO: 9) or NgPglL (SEQ ID NO: 11), a nucleotide sequence encoding enzymes required to make Shigella sonnei O-antigen (SEQ ID NOs: 208-216), and a nucleotide sequence encoding one of each of rEPA32, rEPA34, rEPA36, rEPA38, rEPA40, rEPA41, and rEPA42 (under DsbA periplasmic signal sequence) were operatively introduced into E. coli W3110ΔwaaL. Fourteen different cell lots were made. Coomassie blue staining and Western blot assays show that NmPglL efficiently transferred lipid-carrier-linked S. sonnei O-antigen to all of rEPA32, rEPA34, rEPA36, rEPA38, rEPA40, rEPA41, and rEPA42 in vivo. Likewise, NgPglL efficiently transferred lipid-carrier-linked S. sonnei O-antigen to all of rEPA32, rEPA34, rEPA36, rEPA38, rEPA40, rEPA41, and rEPA42 in vivo. FIG. 11.

[0429] These results show that NgPilin GlycoTag sequence SEQ ID NO: 145 and NgPilin GlycoTag sequence SEQ ID NO: 146 are efficiently O-glycosylated by both NmPglL and NgPglL when the GlycoTag is introduced at the N-terminus or into an internal residue of a carrier protein, here EPA. This was true when using either one copy or two copies of NgPilin GlycoTag sequences SEQ ID NO: 145 and SEQ ID NO: 146. NgPglL glycosylated GlycoTag sequence SEQ ID NO: 146 more efficiently than did NmPglL. FIG. 11.

### Example 8

[0430] NmPglL and NmPglL Homologues Transfer Pneumococcal Capsular Polysaccharides (CPS) to rEPA1

[0431] NmPglL and the twenty homologues thereof described in Example 3 were assessed for their ability to transfer Streptococcus pneumoniae serotype Sp8 or Sp22A CPS glycans onto rEPA1 (under DsbA periplasmic signal sequence) in vivo. Pneumococcal Sp8 CPS has a reducing end structure of Glucuronic acid-β1,4-glucose (Table 1). Pneumococcal Sp22A CPS has a reducing end structure of Rhamnose-β1,4-glucose (Table 1).

[0432] Using established methods, a nucleotide sequence encoding a CPS from Pneumococcal serotype Sp8 or Sp22A, as well as a nucleotide sequence encoding one of the twenty-one Neisserial PglL proteins, and a nucleotide sequence encoding rEPA1 were operatively introduced into E. coli W3110ΔwaaL. Forty-two host cells were made (each CPS being assayed with each of the twenty-one PglLs). In this way, Neisserial PglL contacted each lipid-carrier-linked Pneumococcal CPS peptidoglycan in the presence of rEPA1 and the Neisserial PglL transferred Pneumococcal CPS glycan onto rEPA1 in vivo (Table 5 and FIG. 12A, FIG. 12B, FIG. 13A, and FIG. 13B).

[0433] Coomassie blue staining and Western blot assays confirmed that NmPglL, Neisseria gonorrhoeae PglL (NgPglL) (SEQ ID NO: 11), Neisseria lactamica 020-06 (NlPglL) (SEQ ID NO: 13), Neisseria lactamica ATCC 23970 PglL (Nl_{ATCC23970}PglL) (SEQ ID NO: 15), and Neisseria gonorrhoeae F62 PglL (Ng_{F62}PglL) (SEQ ID NO: 17) transfer lipid-carrier-linked Pneomococcal Sp. 8 CPS glycan onto rEPA1. FIG. 12A., FIG. 12B, and Table 5.

[0434] Coomassie blue staining and Western blot assays confirmed that NmPglL, NgPglL, NlPglL, and Ng_{F62}PglL transfer lipid-carrier-linked Pneomococcal Sp. 22A CPS glycan onto rEPA1. FIG. 13, and Table 5.

TABLE 5

| | | RESULTS: | RESULTS: |
|---|---|---|---|
| | | Transfer | Transfer |
| | | Pneumococcal | Pneumococcal |
| | | Sp. 8 CPS | Sp. 22A CPS |
| | SEQ | glycan onto | glycan onto |
| | ID NO: | NmPilE? | NmPilE? |
| Neisseria meningitidis PglL | 9 | Yes, | Yes, |
| | | inefficiently | inefficiently |
| Neisseria gonorrhoeae PglL | 11 | Yes | Yes, |
| | | | inefficiently |
| Neisseria lactamica 020-06 PglL | 13 | Yes, | Yes, |
| | | inefficiently | inefficiently |
| Neisseria lactamica ATCC 23970 PglL | 15 | Yes, | — |
| | | inefficiently | |
| Neisseria gonorrhoeae F62 PglL | 17 | Yes | Yes |
| Neisseria cinerea ATCC 14685 PglL | 19 | — | — |
| Neisseria mucosa PglL | 21 | — | — |
| Neisseria flavescens NRL30031/H210 | 23 | — | — |
| PglL | | | |
| Neisseria mucosa ATCC 25996 PglL | 25 | — | — |
| Neisseria sp. oral taxon 014 strain | 27 | — | — |
| F0314 PglL | | | |
| Neisseria arctica PglL | 29 | — | — |
| Neisseria shayeganii 871 PglL | 31 | — | — |
| Neisseria shayeganii 871 PglL | 33 | — | — |
| Neisseria sp. 83E34 PglL | 35 | — | — |
| Neisseria wadsworthii PglL | 37 | — | — |
| Neisseria elongata subsp. glycolytica | 39 | — | — |
| ATCC 29315 PglL | | | |
| Neisseria bacilliformis ATCC | 41 | — | — |
| BAA-1200 PglL | | | |
| Neisseria sp. oral taxon 020 str. | 43 | — | — |
| F0370 PglL | | | |
| Neisseria sp. 74A18 PglL | 45 | — | — |
| Neisseria weaver ATCC 51223 PglL | 47 | — | — |
| Neisseria macacae ATCC 33926 PglL | 49 | — | — |

### Example 9

[0435] Comparison of Pilin structures

### GlycoTags:

| | | |
|---|---|---|
| | GlycoTag | GlycoTag |
| Origin | Length | SEQ ID NO: |

GlycoTags 29-35 amino acids in length:

| | | |
|---|---|---|
| Neisseria meningitidis | 29 AAs | 140 |
| Neisseria gonorrhoeae | 30 AAs | 145 |
| Neisseria lactamica 020-06 | 35 AAs | 150 |
| Neisseria shayeganii 871 | 31 AAs | 163 |

GlycoTags 19-20 amino acids in length:

| | | |
|---|---|---|
| Neisseria meningitidis | 19 AAs | 141 |
| Neisseria gonorrhoeae | 20 AAs | 146 |

GlycoTags 12 amino acids in length:

| | | |
|---|---|---|
| Neisseria meningitidis | 12 AAs | 142 |
| Neisseria gonorrhoeae | 12 AAs | 147 |
| Neisseria lactamica 020-06 | 12 AAs | 151 |
| Neisseria shayeganii 871 | 12 AAs | 164 |

SEQ_ID_NO_140
SAVTEYYLNHGEWPGNNTSAGVATS-SEIK------ 29
SEQ_ID_NO_141
----------GEWPGNNTSAGVATS-SEIK------ 19
SEQ_ID_NO_142
----------GEWPGNNTSAGV-------------- 12
SEQ_ID_NO_145
SAVTGYYLNHGTWPKDNTSAGVASSPTDIK------ 30
SEQ_ID_NO_146
----------GTWPKDNTSAGVASSPTDIK------ 20
SEQ_ID_NO_147
----------GTWPKDNTSAGV-------------- 12
SEQ_ID_NO_150
AAVVEYYSDNGTFPAQNASAGIATA-SAITGKYVAK 35
SEQ_ID_NO_151
----------GTFPAQNASAGI-------------- 12
SEQ_ID_NO_163
GAVTEYEADKGVFPTSNASAGVAAA-ADINGK---- 31
SEQ_ID_NO_164
----------GVFPTSNASAGV-------------- 12

### SUMMARY OF SEQUENCES

### Relationship Between Grouped Sequences:

[0437] All exemplified modified carrier proteins (rEPA sequences as well as mAcrA, mPcrv, and mCrm197)—SEQ ID NOs: 51, 53, 55, 57, 59, 61, 63, 65, 67, 69, 71, 73, 75, 77, 79, 81, 83, 85, 87, 89, 91, 93, 95, 97, 99, 101, 103, 105, 107, 109, 111, 113, 115, 117, 119, 121, 123, 125, 127, 129, 131, 133, 135, 199, 202, and 204.
[0438] Just rEPA modified carrier protein sequences—SEQ ID NOs: 51, 53, 55, 57, 59, 61, 63, 65, 67, 69, 71, 73, 75, 77, 79, 81, 83, 85, 87, 89, 91, 93, 95, 97, 99, 101, 103, 105, 107, 109, 111, 113, 115, 117, 119, 121, 123, 125, 127, 129, 131, 133, and 135.
[0439] Modified carrier proteins which were assayed with NmPglL and S. sonnei O-antigen (see rEPA at Example 1; Acr, Per, and Crm197 at Example 2; and Examples 4, 5, and 7)—SEQ ID NOs: 51, 57, 59, 61, 63, 65, 67, 69, 71, 73, 75, 77, 79, 81, 83, 85, 87, 89, 91, 93, 95, 97, 99, 100, 102, 105, 107, 109, 111, 113, 117, 121, 125, 129, 131, 133, 199, 202, and 204
[0440] Modified carrier proteins assayed with NgPglL and S. sonnei O-antigen (see Examples 5, 6, and 7)—SEQ ID NOs: 101, 113, 115, 117, 121, 123, 125, 127, 129, 131, and 133.
   ** sequence features are illustrated (e.g., via underlining) in the specification of the priority application(s)**

### SEQ ID NO: 1

[0441] Pseudomonas exotoxin A (EPA) amino acid sequence (mature sequence/signal sequence removed). Corresponds to NCBI Reference Sequence WP_016851883.1.

Pseudomonas exotoxin A (EPA) amino acid sequence
(signal sequence underlined). Corresponds to
NCBI Reference Sequence WP_016851883.1.
SEQ ID NO: 2
MHLIPHWIPLVASLGLLAGGSFASAAEEAFDLWNECAKACVLDLKDGVRS
SRMSVDPAIADTNGQGVLHYSMVLEGGNDALKLAIDNALSITSDGLTIRL
EGGVEPNKPVRYSYTRQARGSWSLNWLVPIGHEKPSNIKVFIHELNAGNQ
LSHMSPIYTIEMGDELLAKLARDATFFVRAHESNEMQPTLAISHAGVSVV
MAQAQPRREKRWSEWASGKVLCLLDPLDGVYNYLAQQRCNLDDTWEGKIY
RVLAGNPAKHDLDIKPTVISHRLHFPEGGSLAALTAHQACHLPLETFTRH
RQPRGWEQLEQCGYPVQRLVALYLAARLSWNQVDQVIRNALASPGSGGDL
GEAIREQPEQARLALTLAAAESERFVRQGTGNDEAGAASADVVSLTCPVA
AGECAGPADSGDALLERNYPTGAEFLGDGGDVSFSTRGTQNWTVERLLQA
HRQLEERGYVFVGYHGTFLEAAQSIVFGGVRARSQDLDAIWRGFYIAGDP
ALAYGYAQDQEPDARGRIRNGALLRVYVPRWSLPGFYRTGLTLAAPEAAG
EVERLIGHPLPLRLDAITGPEEEGGRLETILGWPLAERTVVIPSAIPTDP
RNVGGDLDPSSIPDKEQAISALPDYASQPGKPPREDLK

### SEQ ID NO: 3

[0442] Pseudomonas exotoxin A (EPA) polynucleotide sequence. Corresponds to NCBI Accession JX026663.1

### SEQ ID NO: 4

[0443] DsbA signal sequence.

### SEQ ID NO: 5

[0444] DsbA signal peptide polynucleotide sequence.

### SEQ ID NO: 6

[0445] Plesiomonas shigelloides O17 (i.e., Shigella sonnei) O-antigen cluster nucleotide sequence (comprising wbgT, wbgU, wzx, wxy, wbgV, wbgW, wbgX, wbgY, and wbgZ coding regions; 10963 bps). Corresponds to NCBI Genbank Accession AF285970.1. [102]

### SEQ ID NO: 7

[0446] PelB signal sequence.

### SEQ ID NO: 8

[0447] Neisseria meningitidis PglL (NmPglL) nucleotide sequence.

### SEQ ID NO: 9

[0448] Neisseria meningitidis PglL (NmPglL) amino acid sequence. Corresponds to NCBI GenBank Accession AEK98518.1.

### SEQ ID NO: 10

[0449] Neisseria gonnorrhoeae PglL (NgPglL) polynucleotide sequence. Corresponds to NCBI GenBank Accession CNT56492.1.

### SEQ ID NO: 11

[0450] Neisseria gonnorrhoeae PglL (NgPglL) amino acid sequence. Corresponds to NCBI GenBank Accession CNT56492.1.

### SEQ ID NO: 12

[0451] Neisseria lactamica 020-06 PglL (NlPglL) polynucleotide sequence. Corresponds to NCBI GenBank Accession CBN87842.1.

### SEQ ID NO: 13

[0452] Neisseria lactamica 020-06 PglL (NlPglL) amino acid sequence. Corresponds to NCBI GenBank Accession CBN87842.1.

### SEQ ID NO: 14

[0453] Neisseria lactamica ATCC 23970 PglL (Nl_{ATCC23970}PglL) polynucleotide sequence. Corresponds to NCBI GenBank Accession EEZ75009.1.

### SEQ ID NO: 15

[0454] Neisseria lactamica ATCC 23970 PglL (Nl_{ATCC23970}PglL) amino acid sequence. Corresponds to NCBI GenBank Accession EEZ75009.1.

### SEQ ID NO: 16

[0455] Neisseria gonorrhoeae F62 PglL (Ng_{F62}PglL) polynucleotide sequence. Corresponds to NCBI GenBank Accession EFF40644.1.

### SEQ ID NO: 17

[0456] Neisseria gonorrhoeae F62 PglL (Ng_{F62}PglL) amino acid sequence. Corresponds to NCBI GenBank Accession EFF40644.1.

### SEQ ID NO: 18

[0457] Neisseria cinerea ATCC 14685 PglL polynucleotide sequence. Corresponds to NCBI GenBank Accession EEZ72274.1.

### SEQ ID NO: 19

[0458] Neisseria cinerea ATCC 14685 PglL amino acid sequence. Corresponds to NCBI GenBank Accession EEZ72274.1.

### SEQ ID NO: 20

[0459] Neisseria mucosa PglL polynucleotide sequence. Corresponds to NCBI GenBank Accession KGJ31457.1.

### SEQ ID NO: 21

[0460] Neisseria mucosa PglL amino acid sequence. Corresponds to NCBI GenBank Accession KGJ31457.1.

### SEQ ID NO: 22

[0461] Neisseria flavescens NRL30031/H210 PglL polynucleotide sequence. Corresponds to NCBI GenBank Accession EEG34481.1.

### SEQ ID NO: 23

[0462] Neisseria flavescens NRL30031/H210 PglL amino acid sequence. Corresponds to NCBI GenBank Accession EEG34481.1.

### SEQ ID NO: 24

[0463] Neisseria mucosa ATCC 25996 PglL (NmuPglL) polynucleotide seqeuence. Corresponds to NCBI GenBank Accession EFC87884.1.

### SEQ ID NO: 25

[0464] Neisseria mucosa ATCC 25996 PglL (NmuPglL) amino acid seqeuence. Corresponds to NCBI GenBank Accession EFC87884.1.

### SEQ ID NO: 26

[0465] Neisseria sp. oral taxon 014 strain F0314 PglL polynucleotide sequence. Corresponds to NCBI GenBank Accession EFI23064.1.

### SEQ ID NO: 27

[0466] Neisseria sp. oral taxon 014 strain F0314 PglL amino acid sequence. Corresponds to NCBI GenBank Accession EFI23064.1.

### SEQ ID NO: 28

[0467] Neisseria arctica PglL polynucleotide sequence. Corresponds to NCBI GenBank Accession KLT72636.1.

### SEQ ID NO: 29

[0468] Neisseria arctica PglL amino acid sequence. Corresponds to NCBI GenBank Accession KLT72636.1.

### SEQ ID NO: 30

[0469] Neisseria shayeganii 871 PglL (Ns2PglL) polynucleotide sequence. Corresponds to NCBI GenBank Accession EGY51766.1.

### SEQ ID NO: 31

[0470] Neisseria shayeganii 871 PglL (Ns2PglL) polynucleotide sequence. Corresponds to NCBI GenBank Accession EGY51766.1.

### SEQ ID NO: 32

[0471] Neisseria shayeganii 871 PglL (NsPglL) polynucleotide sequence. Corresponds to NCBI GenBank Accession EGY51593.1.

### SEQ ID NO: 33

[0472] Neisseria shayeganii 871 PglL (NsPglL) amino acid sequence. Corresponds to NCBI GenBank Accession EGY51593.1.

### SEQ ID NO: 34

[0473] Neisseria sp. 83E34 PglL polynucleotide sequence. Corresponds to NCBI GenBank Accession KPN72282.1.

### SEQ ID NO: 35

[0474] Neisseria sp. 83E34 PglL amino acid sequence. Corresponds to NCBI GenBank Accession KPN72282.1.

### SEQ ID NO: 36

[0475] Neisseria wadsworthii PglL polynucleotide sequence. Corresponds to NCBI GenBank Accession EGZ44098.1.

### SEQ ID NO: 37

[0476] Neisseria wadsworthii PglL amino acid sequence. Corresponds to NCBI GenBank Accession EGZ44098.1.

### SEQ ID NO: 38

[0477] Neisseria elongata subsp. glycolytica ATCC 29315 PglL (NePglL) polynucleotide sequence. Corresponds to NCBI GenBank Accession EFE49313.1.

### SEQ ID NO: 39

[0478] Neisseria elongata subsp. glycolytica ATCC 29315 PglL (NePglL) amino acid sequence. Corresponds to NCBI GenBank Accession EFE49313.1.

### SEQ ID NO: 40

[0479] Neisseria bacilliformis ATCC BAA-1200 PglL (NbPglL) polynucleotide sequence. Corresponds to NCBI GenBank Accession EGF10835.1.

### SEQ ID NO: 41

[0480] Neisseria bacilliformis ATCC BAA-1200 PglL (NbPglL) amino acid sequence. Corresponds to NCBI GenBank Accession EGF10835.1.

### SEQ ID NO: 42

[0481] Neisseria sp. oral taxon 020 str. F0370 PglL polynucleotide sequence. Corresponds to NCBI GenBank Accession EKY03535.1.

### SEQ ID NO: 43

[0482] Neisseria sp. oral taxon 020 str. F0370 PglL amino acid sequence. Corresponds to NCBI GenBank Accession EKY03535.1.

### SEQ ID NO: 44

[0483] Neisseria sp. 74A18 PglL polynucleotide sequence. Corresponds to NCBI GenBank Accession KPN74230.1.

### SEQ ID NO: 45

[0484] Neisseria sp. 74A18 PglL amino acid sequence. Corresponds to NCBI GenBank Accession KPN74230.1.

### SEQ ID NO: 46

[0485] Neisseria weaveri ATCC 51223 PglL polynucleotide sequence. Corresponds to NCBI GenBank Accession EGV35010.1.

### SEQ ID NO: 47

[0486] Neisseria weaveri ATCC 51223 PglL amino acid sequence. Corresponds to NCBI GenBank Accession EGV35010.1.

### SEQ ID NO: 48

[0487] Neisseria macacae ATCC 33926 PglL polynucleotide sequence. Corresponds to NCBI GenBank Accession EGQ77792.1

### SEQ ID NO: 49

[0488] Neisseria macacae ATCC 33926 PglL amino acid sequence. Corresponds to NCBI GenBank Accession EGQ77792.1

### SEQ ID NO: 50

[0489] rEPA1 polynucleotide sequence.

rEPA1 amino acid sequence-GlycoTag sequence
SEQ ID NO: 140 at the N-terminus (DsbA signal
sequence underlined, GlycoTag and 6xHis Tag
(SEQ ID NO: 217) double underlined)
SEQ ID NO: 51
MKKIWLALAGLVLAFSASASAVTEYYLNHGEWPGNNTSAGVATSSEIKAE
EAFDLWNECAKACVLDLKDGVRSSRMSVDPAIADTNGQGVLHYSMVLEGG
NDALKLAIDNALSITSDGLTIRLEGGVEPNKPVRYSYTRQARGSWSLNWL
VPIGHEKPSNIKVFIHELNAGNQLSHMSPIYTIEMGDELLAKLARDATFF
VRAHESNEMQPTLAISHAGVSVVMAQAQPRREKRWSEWASGKVLCLLDPL
DGVYNYLAQQRCNLDDTWEGKIYRVLAGNPAKHDLDIKPTVISHRLHFPE
GGSLAALTAHQACHLPLEAFTRHRQPRGWEQLEQCGYPVQRLVALYLAAR
LSWNQVDQVIRNALASPGSGGDLGEAIREQPEQARLALTLAAAESERFVR
QGTGNDEAGAASADVVSLTCPVAAGECAGPADSGDALLERNYPTGAEFLG
DGGDVSFSTRGTQNWTVERLLQAHRQLEERGYVFVGYHGTFLEAAQSIVF
GGVRARSQDLDAIWRGFYIAGDPALAYGYAQDQEPDARGRIRNGALLRVY
VPRWSLPGFYRTGLTLAAPEAAGEVERLIGHPLPLRLDAITGPEEEGGRV
TILGWPLAERTVVIPSAIPTDPRNVGGDLDPSSIPDKEQAISALPDYASQ
PGKPPREDLKHHHHHH

### SEQ ID NO: 52

[0490] rEPA2 polynucleotide sequence.

rEPA2 amino acid sequence-GlycoTag sequence
SEQ ID NO: 140 in at residue A375 (DsbA signal
sequence and GlycoTag underlined, 6xHis Tag
(SEQ ID NO: 217) double underlined)
SEQ ID NO: 53
MKKIWLALAGLVLAFSASAAEEAFDLWNECAKACVLDLKDGVRSSRMSVD
PAIADTNGQGVLHYSMVLEGGNDALKLAIDNALSITSDGLTIRLEGGVEP
NKPVRYSYTRQARGSWSLNWLVPIGHEKPSNIKVFIHELNAGNQLSHMSP
IYTIEMGDELLAKLARDATFFVRAHESNEMQPTLAISHAGVSVVMAQAQP
RREKRWSEWASGKVLCLLDPLDGVYNYLAQQRCNLDDTWEGKIYRVLAGN
PAKHDLDIKPTVISHRLHFPEGGSLAALTAHQACHLPLEAFTRHRQPRGW
EQLEQCGYPVQRLVALYLAARLSWNQVDQVIRNALASPGSGGDLGEAIRE
QPEQARLALTLAAAESERFVRQGTGNDEAGAASADVVSLTCPVASAVTEY
YLNHGEWPGNNTSAGVATSSEIKGECAGPADSGDALLERNYPTGAEFLGD
GGDVSFSTRGTQNWTVERLLQAHRQLEERGYVFVGYHGTFLEAAQSIVFG
GVRARSQDLDAIWRGFYIAGDPALAYGYAQDQEPDARGRIRNGALLRVYV
PRWSLPGFYRTGLTLAAPEAAGEVERLIGHPLPLRLDAITGPEEEGGRVT
ILGWPLAERTVVIPSAIPTDPRNVGGDLDPSSIPDKEQAISALPDYASQP
GKPPREDLKHHHHHH

### SEQ ID NO: 54

[0491] rEPA3 polynucleotide sequence.

rEPA3 amino acid sequence-GlycoTag sequence
SEQ ID NO: 140 at C-terminus (DsbA signal
sequence and GlycoTag underlined, 6xHis Tag
(SEQ ID NO: 217) double underlined)
SEQ ID NO: 55
MKKIWLALAGLVLAFSASAAEEAFDLWNECAKACVLDLKDGVRSSRMSVD
PAIADTNGQGVLHYSMVLEGGNDALKLAIDNALSITSDGLTIRLEGGVEP
NKPVRYSYTRQARGSWSLNWLVPIGHEKPSNIKVFIHELNAGNQLSHMSP
IYTIEMGDELLAKLARDATFFVRAHESNEMQPTLAISHAGVSVVMAQAQP
RREKRWSEWASGKVLCLLDPLDGVYNYLAQQRCNLDDTWEGKIYRVLAGN
PAKHDLDIKPTVISHRLHFPEGGSLAALTAHQACHLPLEAFTRHRQPRGW
EQLEQCGYPVQRLVALYLAARLSWNQVDQVIRNALASPGSGGDLGEAIRE
QPEQARLALTLAAAESERFVRQGTGNDEAGAASADVVSLTCPVAAGECAG
PADSGDALLERNYPTGAEFLGDGGDVSFSTRGTQNWTVERLLQAHRQLEE
RGYVFVGYHGTFLEAAQSIVFGGVRARSQDLDAIWRGFYIAGDPALAYGY
AQDQEPDARGRIRNGALLRVYVPRWSLPGFYRTGLTLAAPEAAGEVERLI
GHPLPLRLDAITGPEEEGGRVTILGWPLAERTVVIPSAIPTDPRNVGGDL
DPSSIPDKEQAISALPDYASQPGKPPREDLKSAVTEYYLNHGEWPGNNTS
AGVATSSEIKHHHHHH

### SEQ ID NO: 56

[0492] rEPA4 polynucleotide sequence—GlycoTag sequence SEQ ID NO: 140 in at residue A14.

rEPA4 amino acid sequence - GlycoTag sequence
SEQ ID NO: 140 in at residue A14 (DsbA signal
sequence, GlycoTag underlined, and 6xHis
Tag (SEQ ID NO: 217) underlined).
SEQ ID NO: 57
MKKIWLALAGLVLAFSASAAEEAFDLWNECAKSAVTEYYLNHGEWPGNN
TSAGVATSSEIKCVLDLKDGVRSSRMSVDPAIADTNGQGVLHYSMVLEG
GNDALKLAIDNALSITSDGLTIRLEGGVEPNKPVRYSYTRQARGSWSLN
WLVPIGHEKPSNIKVFIHELNAGNQLSHMSPIYTIEMGDELLAKLARDA
TFFVRAHESNEMQPTLAISHAGVSVVMAQAQPRREKRWSEWASGKVLCL
LDPLDGVYNYLAQQRCNLDDTWEGKIYRVLAGNPAKHDLDIKPTVISHR
LHFPEGGSLAALTAHQACHLPLEAFTRHRQPRGWEQLEQCGYPVQRLVA
LYLAARLSWNQVDQVIRNALASPGSGGDLGEAIREQPEQARLALTLAAA
ESERFVRQGTGNDEAGAASADVVSLTCPVAAGECAGPADSGDALLERNY
PTGAEFLGDGGDVSFSTRGTQNWTVERLLQAHRQLEERGYVFVGYHGTF
LEAAQSIVFGGVRARSQDLDAIWRGFYIAGDPALAYGYAQDQEPDARGR
IRNGALLRVYVPRWSLPGFYRTGLTLAAPEAAGEVERLIGHPLPLRLDA
ITGPEEEGGRVTILGWPLAERTVVIPSAIPTDPRNVGGDLDPSSIPDKE
QAISALPDYASQPGKPPREDLKHHHHHH

### SEQ ID NO: 58

[0493] rEPA5 polynucleotide sequence—GlycoTag sequence SEQ ID NO: 140 in at residue D36.

rEPA5 amino acid sequence - GlycoTag sequence
SEQ ID NO: 140 in at residue D36 (DsbA signal
sequence, GlycoTag underlined, and 6xHis
Tag (SEQ ID NO: 217) underlined).
SEQ ID NO: 59
MKKIWLALAGLVLAFSASAAEEAFDLWNECAKACVLDLKDGVRSSRMSV
DPAIASAVTEYYLNHGEWPGNNTSAGVATSSEIKTNGQGVLHYSMVLEG
GNDALKLAIDNALSITSDGLTIRLEGGVEPNKPVRYSYTRQARGSWSLN
WLVPIGHEKPSNIKVFIHELNAGNQLSHMSPIYTIEMGDELLAKLARDA
TFFVRAHESNEMQPTLAISHAGVSVVMAQAQPRREKRWSEWASGKVLCL
LDPLDGVYNYLAQQRCNLDDTWEGKIYRVLAGNPAKHDLDIKPTVISHR
LHFPEGGSLAALTAHQACHLPLEAFTRHRQPRGWEQLEQCGYPVQRLVA
LYLAARLSWNQVDQVIRNALASPGSGGDLGEAIREQPEQARLALTLAAA
ESERFVRQGTGNDEAGAASADVVSLTCPVAAGECAGPADSGDALLERNY
PTGAEFLGDGGDVSFSTRGTQNWTVERLLQAHRQLEERGYVFVGYHGTF
LEAAQSIVFGGVRARSQDLDAIWRGFYIAGDPALAYGYAQDQEPDARGR
IRNGALLRVYVPRWSLPGFYRTGLTLAAPEAAGEVERLIGHPLPLRLDA
ITGPEEEGGRVTILGWPLAERTVVIPSAIPTDPRNVGGDLDPSSIPDKE
QAISALPDYASQPGKPPREDLKHHHHHH

### SEQ ID NO: 60

[0494] rEPA6 polynucleotide sequence—GlycoTag sequence SEQ ID NO: 140 in at residue Q92.

rEPA6 amino acid sequence - GlycoTag sequence
SEQ ID NO: 140 in at residue Q92 (DsbA signal
sequence, GlycoTag underlined, and 6xHis
Tag (SEQ ID NO: 217) underlined).
SEQ ID NO: 61
MKKIWLALAGLVLAFSASAAEEAFDLWNECAKACVLDLKDGVRSSRMSVD
PAIADTNGQGVLHYSMVLEGGNDALKLAIDNALSITSDGLTIRLEGGVEP
NKPVRYSYTRSAVTEYYLNHGEWPGNNTSAGVATSSEIKARGSWSLNWLV
PIGHEKPSNIKVFIHELNAGNQLSHMSPIYTIEMGDELLAKLARDATFFV
RAHESNEMQPTLAISHAGVSVVMAQAQPRREKRWSEWASGKVLCLLDPLD
GVYNYLAQQRCNLDDTWEGKIYRVLAGNPAKHDLDIKPTVISHRLHFPEG
GSLAALTAHQACHLPLEAFTRHRQPRGWEQLEQCGYPVQRLVALYLAARL
SWNQVDQVIRNALASPGSGGDLGEAIREQPEQARLALTLAAAESERFVRQ
GTGNDEAGAASADVVSLTCPVAAGECAGPADSGDALLERNYPTGAEFLGD
GGDVSFSTRGTQNWTVERLLQAHRQLEERGYVFVGYHGTFLEAAQSIVFG
GVRARSQDLDAIWRGFYIAGDPALAYGYAQDQEPDARGRIRNGALLRVYV
PRWSLPGFYRTGLTLAAPEAAGEVERLIGHPLPLRLDAITGPEEEGGRVT
ILGWPLAERTVVIPSAIPTDPRNVGGDLDPSSIPDKEQAISALPDYASQP
GKPPREDLKHHHHHH

### SEQ ID NO: 62

[0495] rEPA7 polynucleotide sequence—GlycoTag sequence SEQ ID NO: 140 in at residue G123.

rEPA7 amino acid sequence - GlycoTag sequence
SEQ ID NO: 140 in at residue G123 (DsbA signal
sequence, GlycoTag underlined, and 6xHis
Tag (SEQ ID NO: 217) underlined).
SEQ ID NO: 63
MKKIWLALAGLVLAFSASAAEEAFDLWNECAKACVLDLKDGVRSSRMSVDP
AIADTNGQGVLHYSMVLEGGNDALKLAIDNALSITSDGLTIRLEGGVEPNK
PVRYSYTRQARGSWSLNWLVPIGHEKPSNIKVFIHELNASAVTEYYLNHGE
WPGNNTSAGVATSSEIKNQLSHMSPIYTIEMGDELLAKLARDATFFVRAHE
SNEMQPTLAISHAGVSVVMAQAQPRREKRWSEWASGKVLCLLDPLDGVYNY
LAQQRCNLDDTWEGKIYRVLAGNPAKHDLDIKPTVISHRLHFPEGGSLAAL
TAHQACHLPLEAFTRHRQPRGWEQLEQCGYPVQRLVALYLAARLSWNQVDQ
VIRNALASPGSGGDLGEAIREQPEQARLALTLAAAESERFVRQGTGNDEAG
AASADVVSLTCPVAAGECAGPADSGDALLERNYPTGAEFLGDGGDVSFSTR
GTQNWTVERLLQAHRQLEERGYVFVGYHGTFLEAAQSIVFGGVRARSQDLD
AIWRGFYIAGDPALAYGYAQDQEPDARGRIRNGALLRVYVPRWSLPGFYRT
GLTLAAPEAAGEVERLIGHPLPLRLDAITGPEEEGGRVTILGWPLAERTVV
IPSAIPTDPRNVGGDLDPSSIPDKEQAISALPDYASQPGKPPREDLKHHHH
HH

### SEQ ID NO: 64

[0496] rEPA8_E157_nucleotide

rEPA8 amino acid sequence - GlycoTag sequence
SEQ ID NO: 140 in at residue E157 (DsbA signal
sequence, GlycoTag underlined, and 6xHis
Tag (SEQ ID NO: 217) underlined).
SEQ ID NO: 65
MKKIWLALAGLVLAFSASAAEEAFDLWNECAKACVLDLKDGVRSSRMSVDP
AIADTNGQGVLHYSMVLEGGNDALKLAIDNALSITSDGLTIRLEGGVEPNK
PVRYSYTRQARGSWSLNWLVPIGHEKPSNIKVFIHELNAGNQLSHMSPIYT
IEMGDELLAKLARDATFFVRAHSAVTEYYLNHGEWPGNNTSAGVATSSEIK
SNEMQPTLAISHAGVSVVMAQAQPRREKRWSEWASGKVLCLLDPLDGVYNY
LAQQRCNLDDTWEGKIYRVLAGNPAKHDLDIKPTVISHRLHFPEGGSLAAL
TAHQACHLPLEAFTRHRQPRGWEQLEQCGYPVQRLVALYLAARLSWNQVDQ
VIRNALASPGSGGDLGEAIREQPEQARLALTLAAAESERFVRQGTGNDEAG
AASADVVSLTCPVAAGECAGPADSGDALLERNYPTGAEFLGDGGDVSFSTR
GTQNWTVERLLQAHRQLEERGYVFVGYHGTFLEAAQSIVFGGVRARSQDLD
AIWRGFYIAGDPALAYGYAQDQEPDARGRIRNGALLRVYVPRWSLPGFYRT
GLTLAAPEAAGEVERLIGHPLPLRLDAITGPEEEGGRVTILGWPLAERTVV
IPSAIPTDPRNVGGDLDPSSIPDKEQAISALPDYASQPGKPPREDLKHHHH
HH

### SEQ ID NO: 66

[0497] rEPA9 polynucleotide sequence—GlycoTag sequence SEQ ID NO: 140 in at residue A177.

rEPA9 amino acid sequence - GlycoTag sequence
SEQ ID NO: 140 in at residue A177 (DsbA signal
sequence, GlycoTag underlined, and 6xHis
Tag (SEQ ID NO: 217) underlined).
SEQ ID NO: 67
MKKIWLALAGLVLAFSASAAEEAFDLWNECAKACVLDLKDGVRSSRMSVD
PAIADTNGQGVLHYSMVLEGGNDALKLAIDNALSITSDGLTIRLEGGVEP
NKPVRYSYTRQARGSWSLNWLVPIGHEKPSNIKVFIHELNAGNQLSHMSP
IYTIEMGDELLAKLARDATFFVRAHESNEMQPTLAISHAGVSVVMSAVTE
YYLNHGEWPGNNTSAGVATSSEIKQAQPRREKRWSEWASGKVLCLLDPLD
GVYNYLAQQRCNLDDTWEGKIYRVLAGNPAKHDLDIKPTVISHRLHFPEG
GSLAALTAHQACHLPLEAFTRHRQPRGWEQLEQCGYPVQRLVALYLAARL
SWNQVDQVIRNALASPGSGGDLGEAIREQPEQARLALTLAAAESERFVRQ
GTGNDEAGAASADVVSLTCPVAAGECAGPADSGDALLERNYPTGAEFLGD
GGDVSFSTRGTQNWTVERLLQAHRQLEERGYVFVGYHGTFLEAAQSIVFG
GVRARSQDLDAIWRGFYIAGDPALAYGYAQDQEPDARGRIRNGALLRVYV
PRWSLPGFYRTGLTLAAPEAAGEVERLIGHPLPLRLDAITGPEEEGGRVT
ILGWPLAERTVVIPSAIPTDPRNVGGDLDPSSIPDKEQAISALPDYASQP
GKPPREDLKHHHHHH

### SEQ ID NO: 68

[0498] rEPA10 polynucleotide sequence—GlycoTag sequence SEQ ID NO: 140 in at residue Y208.

rEPA10 amino acid sequence - GlycoTag sequence
SEQ ID NO: 140 in at residue Y208 (DsbA signal
sequence, GlycoTag underlined, and 6xHis
Tag (SEQ ID NO: 217) underlined).
SEQ ID NO: 69
MKKIWLALAGLVLAFSASAAEEAFDLWNECAKACVLDLKDGVRSSRMSV
DPAIADTNGQGVLHYSMVLEGGNDALKLAIDNALSITSDGLTIRLEGGV
EPNKPVRYSYTRQARGSWSLNWLVPIGHEKPSNIKVFIHELNAGNQLSH
MSPIYTIEMGDELLAKLARDATFFVRAHESNEMQPTLAISHAGVSVVMA
QAQPRREKRWSEWASGKVLCLLDPLDGVYNSAVTEYYLNHGEWPGNNTS
AGVATSSEIKLAQQRCNLDDTWEGKIYRVLAGNPAKHDLDIKPTVISHR
LHFPEGGSLAALTAHQACHLPLEAFTRHRQPRGWEQLEQCGYPVQRLVA
LYLAARLSWNQVDQVIRNALASPGSGGDLGEAIREQPEQARLALTLAAA
ESERFVRQGTGNDEAGAASADVVSLTCPVAAGECAGPADSGDALLERNY
PTGAEFLGDGGDVSFSTRGTQNWTVERLLQAHRQLEERGYVFVGYHGTF
LEAAQSIVFGGVRARSQDLDAIWRGFYIAGDPALAYGYAQDQEPDARGR
IRNGALLRVYVPRWSLPGFYRTGLTLAAPEAAGEVERLIGHPLPLRLDA
ITGPEEEGGRVTILGWPLAERTVVIPSAIPTDPRNVGGDLDPSSIPDKE
QAISALPDYASQPGKPPREDLKHHHHHH

### SEQ ID NO: 70

[0499] rEPA11 polynucleotide sequence—GlycoTag sequence SEQ ID NO: 140 in at residue N231.

rEPA11 amino acid sequence - GlycoTag sequence
SEQ ID NO: 140 in at residue N231 (DsbA signal
sequence, GlycoTag underlined, and 6xHis
Tag (SEQ ID NO: 217) underlined).
SEQ ID NO: 71
MKKIWLALAGLVLAFSASAAEEAFDLWNECAKACVLDLKDGVRSSRMSV
DPAIADTNGQGVLHYSMVLEGGNDALKLAIDNALSITSDGLTIRLEGGV
EPNKPVRYSYTRQARGSWSLNWLVPIGHEKPSNIKVFIHELNAGNQLSH
MSPIYTIEMGDELLAKLARDATFFVRAHESNEMQPTLAISHAGVSVVMA
QAQPRREKRWSEWASGKVLCLLDPLDGVYNYLAQQRCNLDDTWEGKIYR
VLAGSAVTEYYLNHGEWPGNNTSAGVATSSEIKPAKHDLDIKPTVISHR
LHFPEGGSLAALTAHQACHLPLEAFTRHRQPRGWEQLEQCGYPVQRLVA
LYLAARLSWNQVDQVIRNALASPGSGGDLGEAIREQPEQARLALTLAAA
ESERFVRQGTGNDEAGAASADVVSLTCPVAAGECAGPADSGDALLERNY
PTGAEFLGDGGDVSFSTRGTQNWTVERLLQAHRQLEERGYVFVGYHGTF
LEAAQSIVFGGVRARSQDLDAIWRGFYIAGDPALAYGYAQDQEPDARGR
IRNGALLRVYVPRWSLPGFYRTGLTLAAPEAAGEVERLIGHPLPLRLDA
ITGPEEEGGRVTILGWPLAERTVVIPSAIPTDPRNVGGDLDPSSIPDKE
QAISALPDYASQPGKPPREDLKHHHHHH

### SEQ ID NO: 72

[0500] rEPA12 polynucleotide sequence—GlycoTag sequence SEQ ID NO: 140 in at residue E252.

rEPA12 amino acid sequence - GlycoTag sequence
SEQ ID NO: 140 in at residue E252 (DsbA signal
sequence, GlycoTag underlined, and 6xHis
Tag (SEQ ID NO: 217) underlined).
SEQ ID NO: 73
MKKIWLALAGLVLAFSASAAEEAFDLWNECAKACVLDLKDGVRSSRMSVD
PAIADTNGQGVLHYSMVLEGGNDALKLAIDNALSITSDGLTIRLEGGVEP
NKPVRYSYTRQARGSWSLNWLVPIGHEKPSNIKVFIHELNAGNQLSHMSP
IYTIEMGDELLAKLARDATFFVRAHESNEMQPTLAISHAGVSVVMAQAQP
RREKRWSEWASGKVLCLLDPLDGVYNYLAQQRCNLDDTWEGKIYRVLAGN
PAKHDLDIKPTVISHRLHFPSAVTEYYLNHGEWPGNNTSAGVATSSEIKG
GSLAALTAHQACHLPLEAFTRHRQPRGWEQLEQCGYPVQRLVALYLAARL
SWNQVDQVIRNALASPGSGGDLGEAIREQPEQARLALTLAAAESERFVRQ
GTGNDEAGAASADVVSLTCPVAAGECAGPADSGDALLERNYPTGAEFLGD
GGDVSFSTRGTQNWTVERLLQAHRQLEERGYVFVGYHGTFLEAAQSIVFG
GVRARSQDLDAIWRGFYIAGDPALAYGYAQDQEPDARGRIRNGALLRVYV
PRWSLPGFYRTGLTLAAPEAAGEVERLIGHPLPLRLDAITGPEEEGGRVT
ILGWPLAERTVVIPSAIPTDPRNVGGDLDPSSIPDKEQAISALPDYASQP
GKPPREDLKHHHHHH

### SEQ ID NO: 74

[0501] rEPA13 polynucleotide sequence—GlycoTag sequence SEQ ID NO: 140 in at residue 8274.

rEPA13 amino acid sequence - GlycoTag sequence
SEQ ID NO: 140 in at residue R274 (DsbA signal
sequence, GlycoTag underlined, and 6xHis
Tag (SEQ ID NO: 217) underlined).
SEQ ID NO: 75
MKKIWLALAGLVLAFSASAAEEAFDLWNECAKACVLDLKDGVRSSRMSVD
PAIADTNGQGVLHYSMVLEGGNDALKLAIDNALSITSDGLTIRLEGGVEP
NKPVRYSYTRQARGSWSLNWLVPIGHEKPSNIKVFIHELNAGNQLSHMSP
IYTIEMGDELLAKLARDATFFVRAHESNEMQPTLAISHAGVSVVMAQAQP
RREKRWSEWASGKVLCLLDPLDGVYNYLAQQRCNLDDTWEGKIYRVLAGN
PAKHDLDIKPTVISHRLHFPEGGSLAALTAHQACHLPLEAFTSAVTEYYL
NHGEWPGNNTSAGVATSSEIKHRQPRGWEQLEQCGYPVQRLVALYLAARL
SWNQVDQVIRNALASPGSGGDLGEAIREQPEQARLALTLAAAESERFVRQ
GTGNDEAGAASADVVSLTCPVAAGECAGPADSGDALLERNYPTGAEFLGD
GGDVSFSTRGTQNWTVERLLQAHRQLEERGYVFVGYHGTFLEAAQSIVFG
GVRARSQDLDAIWRGFYIAGDPALAYGYAQDQEPDARGRIRNGALLRVYV
PRWSLPGFYRTGLTLAAPEAAGEVERLIGHPLPLRLDAITGPEEEGGRVT
ILGWPLAERTVVIPSAIPTDPRNVGGDLDPSSIPDKEQAISALPDYASQP
GKPPREDLKHHHHHH

### SEQ ID NO: 76

[0502] rEPA14 polynucleotide sequence—GlycoTag sequence SEQ ID NO: 140 in at residue A301.

rEPA14 amino acid sequence - GlycoTag sequence
SEQ ID NO: 140 in at residue A301 (DsbA signal
sequence, GlycoTag underlined, and 6xHis
Tag (SEQ ID NO: 217) underlined).
SEQ ID NO: 77
MKKIWLALAGLVLAFSASAAEEAFDLWNECAKACVLDLKDGVRSSRMSVD
PAIADTNGQGVLHYSMVLEGGNDALKLAIDNALSITSDGLTIRLEGGVEP
NKPVRYSYTRQARGSWSLNWLVPIGHEKPSNIKVFIHELNAGNQLSHMSP
IYTIEMGDELLAKLARDATFFVRAHESNEMQPTLAISHAGVSVVMAQAQP
RREKRWSEWASGKVLCLLDPLDGVYNYLAQQRCNLDDTWEGKIYRVLAGN
PAKHDLDIKPTVISHRLHFPEGGSLAALTAHQACHLPLEAFTRHRQPRGW
EQLEQCGYPVQRLVALYLASAVTEYYLNHGEWPGNNTSAGVATSSEIKRL
SWNQVDQVIRNALASPGSGGDLGEAIREQPEQARLALTLAAAESERFVRQ
GTGNDEAGAASADVVSLTCPVAAGECAGPADSGDALLERNYPTGAEFLGD
GGDVSFSTRGTQNWTVERLLQAHRQLEERGYVFVGYHGTFLEAAQSIVFG
GVRARSQDLDAIWRGFYIAGDPALAYGYAQDQEPDARGRIRNGALLRVYV
PRWSLPGFYRTGLTLAAPEAAGEVERLIGHPLPLRLDAITGPEEEGGRVT
ILGWPLAERTVVIPSAIPTDPRNVGGDLDPSSIPDKEQAISALPDYASQP
GKPPREDLKHHHHHH

### SEQ ID NO: 78

[0503] rEPA15 polynucleotide sequence—GlycoTag sequence SEQ ID NO: 140 in at residue Q307.

rEPA15 amino acid sequence - GlycoTag sequence
SEQ ID NO: 140 in at residue Q307 (DsbA signal
sequence, GlycoTag underlined, and 6xHis
Tag (SEQ ID NO: 217) underlined).
SEQ ID NO: 79
MKKIWLALAGLVLAFSASAAEEAFDLWNECAKACVLDLKDGVRSSRMSV
DPAIADTNGQGVLHYSMVLEGGNDALKLAIDNALSITSDGLTIRLEGGV
EPNKPVRYSYTRQARGSWSLNWLVPIGHEKPSNIKVFIHELNAGNQLSH
MSPIYTIEMGDELLAKLARDATFFVRAHESNEMQPTLAISHAGVSVVMA
QAQPRREKRWSEWASGKVLCLLDPLDGVYNYLAQQRCNLDDTWEGKIYR
VLAGNPAKHDLDIKPTVISHRLHFPEGGSLAALTAHQACHLPLEAFTRH
RQPRGWEQLEQCGYPVQRLVALYLAARLSWNSAVTEYYLNHGEWPGNNT
SAGVATSSEIKVDQVIRNALASPGSGGDLGEAIREQPEQARLALTLAAA
ESERFVRQGTGNDEAGAASADVVSLTCPVAAGECAGPADSGDALLERNY
PTGAEFLGDGGDVSFSTRGTQNWTVERLLQAHRQLEERGYVFVGYHGTF
LEAAQSIVFGGVRARSQDLDAIWRGFYIAGDPALAYGYAQDQEPDARGR
IRNGALLRVYVPRWSLPGFYRTGLTLAAPEAAGEVERLIGHPLPLRLDA
ITGPEEEGGRVTILGWPLAERTVVIPSAIPTDPRNVGGDLDPSSIPDKE
QAISALPDYASQPGKPPREDLKHHHHHH

### SEQ ID NO: 80

[0504] rEPA16 polynucleotide sequence—GlycoTag sequence SEQ ID NO: 140 in at residue A365.

rEPA16 amino acid sequence - GlycoTag sequence
SEQ ID NO: 140 in at residue A365 (DsbA signal
sequence, GlycoTag underlined, and 6xHis
Tag (SEQ ID NO: 217) underlined).
SEQ ID NO: 81
MKKIWLALAGLVLAFSASAAEEAFDLWNECAKACVLDLKDGVRSSRMSV
DPAIADTNGQGVLHYSMVLEGGNDALKLAIDNALSITSDGLTIRLEGGV
EPNKPVRYSYTRQARGSWSLNWLVPIGHEKPSNIKVFIHELNAGNQLSH
MSPIYTIEMGDELLAKLARDATFFVRAHESNEMQPTLAISHAGVSVVMA
QAQPRREKRWSEWASGKVLCLLDPLDGVYNYLAQQRCNLDDTWEGKIYR
VLAGNPAKHDLDIKPTVISHRLHFPEGGSLAALTAHQACHLPLEAFTRH
RQPRGWEQLEQCGYPVQRLVALYLAARLSWNQVDQVIRNALASPGSGGD
LGEAIREQPEQARLALTLAAAESERFVRQGTGNDEAGAASSAVTEYYLN
HGEWPGNNTSAGVATSSEIKDVVSLTCPVAAGECAGPADSGDALLERNY
PTGAEFLGDGGDVSFSTRGTQNWTVERLLQAHRQLEERGYVFVGYHGTF
LEAAQSIVFGGVRARSQDLDAIWRGFYIAGDPALAYGYAQDQEPDARGR
IRNGALLRVYVPRWSLPGFYRTGLTLAAPEAAGEVERLIGHPLPLRLDA
ITGPEEEGGRVTILGWPLAERTVVIPSAIPTDPRNVGGDLDPSSIPDKE
QAISALPDYASQPGKPPREDLKHHHHHH

### SEQ ID NO: 82

[0505] rEPA17 polynucleotide sequence—GlycoTag sequence SEQ ID NO: 140 in at residue S408.

rEPA17 amino acid sequence - GlycoTag sequence
SEQ ID NO: 140 in at residue S408 (DsbA signal
sequence, GlycoTag underlined, and 6xHis
Tag (SEQ ID NO: 217) underlined).
SEQ ID NO: 83
MKKIWLALAGLVLAFSASAAEEAFDLWNECAKACVLDLKDGVRSSRMSVD
PAIADTNGQGVLHYSMVLEGGNDALKLAIDNALSITSDGLTIRLEGGVEP
NKPVRYSYTRQARGSWSLNWLVPIGHEKPSNIKVFIHELNAGNQLSHMSP
IYTIEMGDELLAKLARDATFFVRAHESNEMQPTLAISHAGVSVVMAQAQP
RREKRWSEWASGKVLCLLDPLDGVYNYLAQQRCNLDDTWEGKIYRVLAGN
PAKHDLDIKPTVISHRLHFPEGGSLAALTAHQACHLPLEAFTRHRQPRGW
EQLEQCGYPVQRLVALYLAARLSWNQVDQVIRNALASPGSGGDLGEAIRE
QPEQARLALTLAAAESERFVRQGTGNDEAGAASADVVSLTCPVAAGECAG
PADSGDALLERNYPTGAEFLGDGGDVSAVTEYYLNHGEWPGNNTSAGVAT
SSEIKFSTRGTQNWTVERLLQAHRQLEERGYVFVGYHGTFLEAAQSIVFG
GVRARSQDLDAIWRGFYIAGDPALAYGYAQDQEPDARGRIRNGALLRVYV
PRWSLPGFYRTGLTLAAPEAAGEVERLIGHPLPLRLDAITGPEEEGGRVT
ILGWPLAERTVVIPSAIPTDPRNVGGDLDPSSIPDKEQAISALPDYASQP
GKPPREDLKHHHHHH

### SEQ ID NO: 84

[0506] rEPA18 polynucleotide sequence—GlycoTag sequence SEQ ID NO: 140 in at residue T418.

rEPA18 amino acid sequence - GlycoTag sequence
SEQ ID NO: 140 in at residue T418 (DsbA signal
sequence, GlycoTag underlined, and 6xHis
Tag (SEQ ID NO: 217) underlined).
SEQ ID NO: 85
MKKIWLALAGLVLAFSASAAEEAFDLWNECAKACVLDLKDGVRSSRMS
VDPAIADTNGQGVLHYSMVLEGGNDALKLAIDNALSITSDGLTIRLEG
GVEPNKPVRYSYTRQARGSWSLNWLVPIGHEKPSNIKVFIHELNAGNQ
LSHMSPIYTIEMGDELLAKLARDATFFVRAHESNEMQPTLAISHAGVS
VVMAQAQPRREKRWSEWASGKVLCLLDPLDGVYNYLAQQRCNLDDTWE
GKIYRVLAGNPAKHDLDIKPTVISHRLHFPEGGSLAALTAHQACHLPL
EAFTRHRQPRGWEQLEQCGYPVQRLVALYLAARLSWNQVDQVIRNALA
SPGSGGDLGEAIREQPEQARLALTLAAAESERFVRQGTGNDEAGAASA
DVVSLTCPVAAGECAGPADSGDALLERNYPTGAEFLGDGGDVSFSTRG
TQNWSAVTEYYLNHGEWPGNNTSAGVATSSEIKVERLLQAHRQLEERG
YVFVGYHGTFLEAAQSIVFGGVRARSQDLDAIWRGFYIAGDPALAYGY
AQDQEPDARGRIRNGALLRVYVPRWSLPGFYRTGLTLAAPEAAGEVER
LIGHPLPLRLDAITGPEEEGGRVTILGWPLAERTVVIPSAIPTDPRNV
GGDLDPSSIPDKEQAISALPDYASQPGKPPREDLKHHHHHH

### SEQ ID NO: 86

[0507] rEPA19 polynucleotide sequence—GlycoTag sequence SEQ ID NO: 140 in at residue A464.

rEPA19 amino acid sequence-GlycoTag sequence
SEQ ID NO: 140 in at residue A464 (DsbA signal
sequence, GlycoTag underlined, and 6xHis
Tag (SEQ ID NO: 217) underlined).
SEQ ID NO: 87
MKKIWLALAGLVLAFSASAAEEAFDLWNECAKAC
VLDLKDGVRSSRMSVDPAIADTNGQGVLHYSMVL
EGGNDALKLAIDNALSITSDGLTIRLEGGVEPNK
PVRYSYTRQARGSWSLNWLVPIGHEKPSNIKVFI
HELNAGNQLSHMSPIYTIEMGDELLAKLARDATF
FVRAHESNEMQPTLAISHAGVSVVMAQAQPRREK
RWSEWASGKVLCLLDPLDGVYNYLAQQRCNLDDT
WEGKIYRVLAGNPAKHDLDIKPTVISHRLHFPEG
GSLAALTAHQACHLPLEAFTRHRQPRGWEQLEQC
GYPVQRLVALYLAARLSWNQVDQVIRNALASPGS
GGDLGEAIREQPEQARLALTLAAAESERFVRQGT
GNDEAGAASADVVSLTCPVAAGECAGPADSGDAL
LERNYPTGAEFLGDGGDVSFSTRGTQNWTVERLL
QAHRQLEERGYVFVGYHGTFLEAAQSIVFGGVRA
RSQDLDSAVTEYYLNHGEWPGNNTSAGVATSSEI
KIWRGFYIAGDPALAYGYAQDQEPDARGRIRNGA
LLRVYVPRWSLPGFYRTGLTLAAPEAAGEVERLI
GHPLPLRLDAITGPEEEGGRVTILGWPLAERTVV
IPSAIPTDPRNVGGDLDPSSIPDKEQAISALPDY
ASQPGKPPREDLKHHHHHH

### SEQ ID NO: 88

[0508] rEPA20 polynucleotide sequence—GlycoTag sequence SEQ ID NO: 140 in at residue A519.

rEPA20 amino acid sequence-GlycoTag sequence
SEQ ID NO: 140 in at residue A519 (DsbA signal
sequence, GlycoTag underlined, and 6xHis Tag
(SEQ ID NO: 217) underlined).
SEQ ID NO: 89
MKKIWLALAGLVLAFSASAAEEAFDLWNECAKAC
VLDLKDGVRSSRMSVDPAIADTNGQGVLHYSMVL
EGGNDALKLAIDNALSITSDGLTIRLEGGVEPNK
PVRYSYTRQARGSWSLNWLVPIGHEKPSNIKVFI
HELNAGNQLSHMSPIYTIEMGDELLAKLARDATF
FVRAHESNEMQPTLAISHAGVSVVMAQAQPRREK
RWSEWASGKVLCLLDPLDGVYNYLAQQRCNLDDT
WEGKIYRVLAGNPAKHDLDIKPTVISHRLHFPEG
GSLAALTAHQACHLPLEAFTRHRQPRGWEQLEQC
GYPVQRLVALYLAARLSWNQVDQVIRNALASPGS
GGDLGEAIREQPEQARLALTLAAAESERFVRQGT
GNDEAGAASADVVSLTCPVAAGECAGPADSGDAL
LERNYPTGAEFLGDGGDVSFSTRGTQNWTVERLL
QAHRQLEERGYVFVGYHGTFLEAAQSIVFGGVRA
RSQDLDAIWRGFYIAGDPALAYGYAQDQEPDARG
RIRNGALLRVYVPRWSLPGFYRTGLTLSAVTEYY
LNHGEWPGNNTSAGVATSSEIKAPEAAGEVERLI
GHPLPLRLDAITGPEEEGGRVTILGWPLAERTVV
IPSAIPTDPRNVGGDLDPSSIPDKEQAISALPDY
ASQPGKPPREDLKHHHHHH

### SEQ ID NO: 90

[0509] rEPA21 polynucleotide sequence—GlycoTag sequence SEQ ID NO: 140 in at residue G525.

rEPA21 amino acid sequence-GlycoTag sequence
SEQ ID NO: 140 in at residue G525 (DsbA signal
sequence, GlycoTag underlined, and 6xHis Tag
(SEQ ID NO: 217) underlined).
SEQ ID NO: 91
MKKIWLALAGLVLAFSASAAEEAFDLWNECAKAC
VLDLKDGVRSSRMSVDPAIADTNGQGVLHYSMVL
EGGNDALKLAIDNALSITSDGLTIRLEGGVEPNK
PVRYSYTRQARGSWSLNWLVPIGHEKPSNIKVFI
HELNAGNQLSHMSPIYTIEMGDELLAKLARDATF
FVRAHESNEMQPTLAISHAGVSVVMAQAQPRREK
RWSEWASGKVLCLLDPLDGVYNYLAQQRCNLDDT
WEGKIYRVLAGNPAKHDLDIKPTVISHRLHFPEG
GSLAALTAHQACHLPLEAFTRHRQPRGWEQLEQC
GYPVQRLVALYLAARLSWNQVDQVIRNALASPGS
GGDLGEAIREQPEQARLALTLAAAESERFVRQGT
GNDEAGAASADVVSLTCPVAAGECAGPADSGDAL
LERNYPTGAEFLGDGGDVSFSTRGTQNWTVERLL
QAHRQLEERGYVFVGYHGTFLEAAQSIVFGGVRA
RSQDLDAIWRGFYIAGDPALAYGYAQDQEPDARG
RIRNGALLRVYVPRWSLPGFYRTGLTLAAPEAAS
AVTEYYLNHGEWPGNNTSAGVATSSEIKEVERLI
GHPLPLRLDAITGPEEEGGRVTILGWPLAERTVV
IPSAIPTDPRNVGGDLDPSSIPDKEQAISALPDY
ASQPGKPPREDLKHHHHHH

### SEQ ID NO: 92

[0510] rEPA22 polynucleotide sequence—GlycoTag sequence SEQ ID NO: 140 in at residue H533.

rEPA22 amino acid sequence-GlycoTag sequence
SEQ ID NO: 140 in at residue H533 (DsbA signal
sequence, GlycoTag underlined, and 6xHis Tag
(SEQ ID NO: 217) underlined).
SEQ ID NO: 93
MKKIWLALAGLVLAFSASAAEEAFDLWNECAKAC
VLDLKDGVRSSRMSVDPAIADTNGQGVLHYSMVL
EGGNDALKLAIDNALSITSDGLTIRLEGGVEPNK
PVRYSYTRQARGSWSLNWLVPIGHEKPSNIKVFI
HELNAGNQLSHMSPIYTIEMGDELLAKLARDATF
FVRAHESNEMQPTLAISHAGVSVVMAQAQPRREK
RWSEWASGKVLCLLDPLDGVYNYLAQQRCNLDDT
WEGKIYRVLAGNPAKHDLDIKPTVISHRLHFPEG
GSLAALTAHQACHLPLEAFTRHRQPRGWEQLEQC
GYPVQRLVALYLAARLSWNQVDQVIRNALASPGS
GGDLGEAIREQPEQARLALTLAAAESERFVRQGT
GNDEAGAASADVVSLTCPVAAGECAGPADSGDAL
LERNYPTGAEFLGDGGDVSFSTRGTQNWTVERLL
QAHRQLEERGYVFVGYHGTFLEAAQSIVFGGVRA
RSQDLDAIWRGFYIAGDPALAYGYAQDQEPDARG
RIRNGALLRVYVPRWSLPGFYRTGLTLAAPEAAG
EVERLIGSAVTEYYLNHGEWPGNNTSAGVATSSE
IKPLPLRLDAITGPEEEGGRVTILGWPLAERTVV
IPSAIPTDPRNVGGDLDPSSIPDKEQAISALPDY
ASQPGKPPREDLKHHHHHH

### SEQ ID NO: 94

[0511] rEPA23 polynucleotide sequence—GlycoTag sequence SEQ ID NO: 140 in at residue S585.

rEPA23 amino acid sequence-GlycoTag sequence
SEQ ID NO: 140 in at residue S585 (DsbA signal
sequence, GlycoTag underlined, and 6xHis Tag
(SEQ ID NO: 217) underlined).
SEQ ID NO: 95
MKKIWLALAGLVLAFSASAAEEAFDLWNECAKAC
VLDLKDGVRSSRMSVDPAIADTNGQGVLHYSMVL
EGGNDALKLAIDNALSITSDGLTIRLEGGVEPNK
PVRYSYTRQARGSWSLNWLVPIGHEKPSNIKVFI
HELNAGNQLSHMSPIYTIEMGDELLAKLARDATF
FVRAHESNEMQPTLAISHAGVSVVMAQAQPRREK
RWSEWASGKVLCLLDPLDGVYNYLAQQRCNLDDT
WEGKIYRVLAGNPAKHDLDIKPTVISHRLHFPEG
GSLAALTAHQACHLPLEAFTRHRQPRGWEQLEQC
GYPVQRLVALYLAARLSWNQVDQVIRNALASPGS
GGDLGEAIREQPEQARLALTLAAAESERFVRQGT
GNDEAGAASADVVSLTCPVAAGECAGPADSGDAL
LERNYPTGAEFLGDGGDVSFSTRGTQNWTVERLL
QAHRQLEERGYVFVGYHGTFLEAAQSIVFGGVRA
RSQDLDAIWRGFYIAGDPALAYGYAQDQEPDARG
RIRNGALLRVYVPRWSLPGFYRTGLTLAAPEAAG
EVERLIGHPLPLRLDAITGPEEEGGRVTILGWPL
AERTVVIPSAIPTDPRNVGGDLDPSSAVTEYYLN
HGEWPGNNTSAGVATSSEIKIPDKEQAISALPDY
ASQPGKPPREDLKHHHHHH

### SEQ ID NO: 96

[0512] rEPA24_polynucleotide sequence—GlycoTag sequence SEQ ID NO: 140 in at residue K240.

rEPA24_amino acid sequence-GlycoTag sequence
SEQ ID NO: 140 in at residue K240 (DsbA signal
sequence, GlycoTag underlined, and 6xHis Tag
(SEQ ID NO: 217) underlined).
SEQ ID NO: 97
MKKIWLALAGLVLAFSASAAEEAFDLWNECAKAC
VLDLKDGVRSSRMSVDPAIADTNGQGVLHYSMVL
EGGNDALKLAIDNALSITSDGLTIRLEGGVEPNK
PVRYSYTRQARGSWSLNWLVPIGHEKPSNIKVFI
HELNAGNQLSHMSPIYTIEMGDELLAKLARDATF
FVRAHESNEMQPTLAISHAGVSVVMAQAQPRREK
RWSEWASGKVLCLLDPLDGVYNYLAQQRCNLDDT
WEGKIYRVLAGNPAKHDLDISAVTEYYLNHGEWP
GNNTSAGVATSSEIKPTVISHRLHFPEGGSLAAL
TAHQACHLPLEAFTRHRQPRGWEQLEQCGYPVQR
LVALYLAARLSWNQVDQVIRNALASPGSGGDLGE
AIREQPEQARLALTLAAAESERFVRQGTGNDEAG
AASADVVSLTCPVAAGECAGPADSGDALLERNYP
TGAEFLGDGGDVSFSTRGTQNWTVERLLQAHRQL
EERGYVFVGYHGTFLEAAQSIVFGGVRARSQDLD
AIWRGFYIAGDPALAYGYAQDQEPDARGRIRNGA
LLRVYVPRWSLPGFYRTGLTLAAPEAAGEVERLI
GHPLPLRLDAITGPEEEGGRVTILGWPLAERTVV
IPSAIPTDPRNVGGDLDPSSIPDKEQAISALPDY
ASQPGKPPREDLKHHHHHH

### SEQ ID NO: 98

[0513] rEPA25 polynucleotide sequence—GlycoTag sequence SEQ ID NO: 140 in at residue A375.

rEPA25 amino acid sequence-GlycoTag sequence
SEQ ID NO: 140 in at residue A375 (DsbA signal
sequence, GlycoTag underlined, and 6xHis Tag
(SEQ ID NO: 217) underlined).
SEQ ID NO: 99
MKKIWLALAGLVLAFSASAAEEAFDLWNECAKAC
VLDLKDGVRSSRMSVDPAIADTNGQGVLHYSMVL
EGGNDALKLAIDNALSITSDGLTIRLEGGVEPNK
PVRYSYTRQARGSWSLNWLVPIGHEKPSNIKVFI
HELNAGNQLSHMSPIYTIEMGDELLAKLARDATF
FVRAHESNEMQPTLAISHAGVSVVMAQAQPRREK
RWSEWASGKVLCLLDPLDGVYNYLAQQRCNLDDT
WEGKIYRVLAGNPAKHDLDIKPTVISHRLHFPEG
GSLAALTAHQACHLPLEAFTRHRQPRGWEQLEQC
GYPVQRLVALYLAARLSWNQVDQVIRNALASPGS
GGDLGEAIREQPEQARLALTLAAAESERFVRQGT
GNDEAGAASADVVSLTCPVASAVTEYYLNHGEWP
GNNTSAGVATSSEIKGECAGPADSGDALLERNYP
TGAEFLGDGGDVSFSTRGTQNWTVERLLQAHRQL
EERGYVFVGYHGTFLEAAQSIVFGGVRARSQDLD
AIWRGFYIAGDPALAYGYAQDQEPDARGRIRNGA
LLRVYVPRWSLPGFYRTGLTLAAPEAAGEVERLI
GHPLPLRLDAITGPEEEGGRVTILGWPLAERTVV
IPSAIPTDPRNVGGDLDPSSIPDKEQAISALPDY
ASQPGKPPREDLKHHHHHH

### SEQ ID NO: 100

[0514] rEPA26 polynucleotide sequence—GlycotTag sequence SEQ ID NO: 145 at N-terminus.

rEPA26 amino acid sequence-GlycoTag sequence
SEQ ID NO: 145 at N-terminus (DsbA signal
sequence and 6xHis Tag (SEQ ID NO: 217)
underlined, GlycoTag double underlined).
SEQ ID NO: 101
MKKIWLALAGLVLAFSASASSAVTGYYLNHGTWP
KDNTSAGVASSPTDIKAEEAFDLWNECAKACVLD
LKDGVRSSRMSVDPAIADTNGQGVLHYSMVLEGG
NDALKLAIDNALSITSDGLTIRLEGGVEPNKPVR
YSYTRQARGSWSLNWLVPIGHEKPSNIKVFIHEL
NAGNQLSHMSPIYTIEMGDELLAKLARDATFFVR
AHESNEMQPTLAISHAGVSVVMAQAQPRREKRWS
EWASGKVLCLLDPLDGVYNYLAQQRCNLDDTWEG
KIYRVLAGNPAKHDLDIKPTVISHRLHFPEGGSL
AALTAHQACHLPLEAFTRHRQPRGWEQLEQCGYP
VQRLVALYLAARLSWNQVDQVIRNALASPGSGGD
LGEAIREQPEQARLALTLAAAESERFVRQGTGND
EAGAASADVVSLTCPVAAGECAGPADSGDALLER
NYPTGAEFLGDGGDVSFSTRGTQNWTVERLLQAH
RQLEERGYVFVGYHGTFLEAAQSIVFGGVRARSQ
DLDAIWRGFYIAGDPALAYGYAQDQEPDARGRIR
NGALLRVYVPRWSLPGFYRTGLTLAAPEAAGEVE
RLIGHPLPLRLDAITGPEEEGGRVTILGWPLAER
TVVIPSAIPTDPRNVGGDLDPSSIPDKEQAISAL
PDYASQPGKPPREDLKHHHHHH

### SEQ ID NO: 102

[0515] rEPA27 polynucleotide sequence—GlycoTag sequence SEQ ID NO: 150 at N-terminus.

rEPA27 amino acid sequence-GlycoTag sequence
SEQ ID NO: 150 at N-terminus (DsbA signal
sequence and 6xHis Tag (SEQ ID NO: 217)
underlined, GlycoTag double underlined).
SEQ ID NO: 103
MKKIWLALAGLVLAFSASASAAVVEYYSDNGTFP
AQNASAGIATASAITGKYVAKAEEAFDLWNECAK
ACVLDLKDGVRSSRMSVDPAIADTNGQGVLHYSM
VLEGGNDALKLAIDNALSITSDGLTIRLEGGVEP
NKPVRYSYTRQARGSWSLNWLVPIGHEKPSNIKV
FIHELNAGNQLSHMSPIYTIEMGDELLAKLARDA
TFFVRAHESNEMQPTLAISHAGVSVVMAQAQPRR
EKRWSEWASGKVLCLLDPLDGVYNYLAQQRCNLD
DTWEGKIYRVLAGNPAKHDLDIKPTVISHRLHFP
EGGSLAALTAHQACHLPLEAFTRHRQPRGWEQLE
QCGYPVQRLVALYLAARLSWNQVDQVIRNALASP
GSGGDLGEAIREQPEQARLALTLAAAESERFVRQ
GTGNDEAGAASADVVSLTCPVAAGECAGPADSGD
ALLERNYPTGAEFLGDGGDVSFSTRGTQNWTVER
LLQAHRQLEERGYVFVGYHGTFLEAAQSIVFGGV
RARSQDLDAIWRGFYIAGDPALAYGYAQDQEPDA
RGRIRNGALLRVYVPRWSLPGFYRTGLTLAAPEA
AGEVERLIGHPLPLRLDAITGPEEEGGRVTILGW
PLAERTVVIPSAIPTDPRNVGGDLDPSSIPDKEQ
AISALPDYASQPGKPPREDLKHHHHHH

### SEQ ID NO: 104

[0516] rEPA28 polynucleotide sequence—GlycoTag sequence SEQ ID NO: 154 at N-terminus.

rEPA28 amino acid sequence-GlycoTag sequence
SEQ ID NO: 154 at N-terminus (DsbA signal
sequence and 6xHis Tag (SEQ ID NO: 217)
underlined, GlycoTag double underlined).
SEQ ID NO: 105
MKKIWLALAGLVLAFSASASSALSEAFQTDGITG
MTAAAKAFNKTAAAGGGAGGAAAAGTQHASKAEE
AFDLWNECAKACVLDLKDGVRSSRMSVDPAIADT
NGQGVLHYSMVLEGGNDALKLAIDNALSITSDGL
TIRLEGGVEPNKPVRYSYTRQARGSWSLNWLVPI
GHEKPSNIKVFIHELNAGNQLSHMSPIYTIEMGD
ELLAKLARDATFFVRAHESNEMQPTLAISHAGVS
VVMAQAQPRREKRWSEWASGKVLCLLDPLDGVYN
YLAQQRCNLDDTWEGKIYRVLAGNPAKHDLDIKP
TVISHRLHFPEGGSLAALTAHQACHLPLEAFTRH
RQPRGWEQLEQCGYPVQRLVALYLAARLSWNQVD
QVIRNALASPGSGGDLGEAIREQPEQARLALTLA
AAESERFVRQGTGNDEAGAASADVVSLTCPVAAG
ECAGPADSGDALLERNYPTGAEFLGDGGDVSFST
RGTQNWTVERLLQAHRQLEERGYVFVGYHGTFLE
AAQSIVFGGVRARSQDLDAIWRGFYIAGDPALAY
GYAQDQEPDARGRIRNGALLRVYVPRWSLPGFYR
TGLTLAAPEAAGEVERLIGHPLPLRLDAITGPEE
EGGRVTILGWPLAERTVVIPSAIPTDPRNVGGDL
DPSSIPDKEQAISALPDYASQPGKPPREDLKHHH
HHH

### SEQ ID NO: 106

[0517] rEPA29 polynucleotide sequence—GlycoTag sequence SEQ ID NO: 157 at N-terminus.

rEPA29 amino acid sequence-GlycoTag sequence
SEQ ID NO: 157 at N-terminus (DsbA signal
sequence and 6xHis Tag (SEQ ID NO: 217)
underlined, GlycoTag double underlined).
SEQ ID NO: 107
MKKIWLALAGLVLAFSASASTLISTDATSINDLD
IAVAAWNRQANNTGANSKYVTSVAEEAFDLWNEC
AKACVLDLKDGVRSSRMSVDPAIADTNGQGVLHY
SMVLEGGNDALKLAIDNALSITSDGLTIRLEGGV
EPNKPVRYSYTRQARGSWSLNWLVPIGHEKPSNI
KVFIHELNAGNQLSHMSPIYTIEMGDELLAKLAR
DATFFVRAHESNEMQPTLAISHAGVSVVMAQAQP
RREKRWSEWASGKVLCLLDPLDGVYNYLAQQRCN
LDDTWEGKIYRVLAGNPAKHDLDIKPTVISHRLH
FPEGGSLAALTAHQACHLPLEAFTRHRQPRGWEQ
LEQCGYPVQRLVALYLAARLSWNQVDQVIRNALA
SPGSGGDLGEAIREQPEQARLALTLAAAESERFV
RQGTGNDEAGAASADVVSLTCPVAAGECAGPADS
GDALLERNYPTGAEFLGDGGDVSFSTRGTQNWTV
ERLLQAHRQLEERGYVFVGYHGTFLEAAQSIVFG
GVRARSQDLDAIWRGFYIAGDPALAYGYAQDQEP
DARGRIRNGALLRVYVPRWSLPGFYRTGLTLAAP
EAAGEVERLIGHPLPLRLDAITGPEEEGGRVTIL
GWPLAERTVVIPSAIPTDPRNVGGDLDPSSIPDK
EQAISALPDYASQPGKPPREDLKHHHHHH

### SEQ ID NO: 108

[0518] rEPA30 polynucleotide sequence—GlycoTag sequence SEQ ID NO: 160 at N-terminus.

rEPA30 amino acid sequence-GlycoTag sequence
SEQ ID NO: 160 at N-terminus (DsbA signal
sequence and 6xHis Tag (SEQ ID NO: 217)
underlined, GlycoTag double underlined).
SEQ ID NO: 109
MKKIWLALAGLVLAFSASASTPLVEAVAASSNAI
ACKNNAPWYTSSVQSGKYVSAIEPAVKAEEAFDL
WNECAKACVLDLKDGVRSSRMSVDPAIADTNGQG
VLHYSMVLEGGNDALKLAIDNALSITSDGLTIRL
EGGVEPNKPVRYSYTRQARGSWSLNWLVPIGHEK
PSNIKVFIHELNAGNQLSHMSPIYTIEMGDELLA
KLARDATFFVRAHESNEMQPTLAISHAGVSVVMA
QAQPRREKRWSEWASGKVLCLLDPLDGVYNYLAQ
QRCNLDDTWEGKIYRVLAGNPAKHDLDIKPTVIS
HRLHFPEGGSLAALTAHQACHLPLEAFTRHRQPR
GWEQLEQCGYPVQRLVALYLAARLSWNQVDQVIR
NALASPGSGGDLGEAIREQPEQARLALTLAAAES
ERFVRQGTGNDEAGAASADVVSLTCPVAAGECAG
PADSGDALLERNYPTGAEFLGDGGDVSFSTRGTQ
NWTVERLLQAHRQLEERGYVFVGYHGTFLEAAQS
IVFGGVRARSQDLDAIWRGFYIAGDPALAYGYAQ
DQEPDARGRIRNGALLRVYVPRWSLPGFYRTGLT
LAAPEAAGEVERLIGHPLPLRLDAITGPEEEGGR
VTILGWPLAERTVVIPSAIPTDPRNVGGDLDPSS
IPDKEQAISALPDYASQPGKPPREDLKHHHHHH

### SEQ ID NO: 110

[0519] rEPA31 polynucleotide sequence—GlycoTag sequence SEQ ID NO: 163 at N-terminus.

rEPA31_amino acid sequence-GlycoTag sequence
SEQ ID NO: 163 at N-terminus (DsbA signal
sequence and 6xHis Tag (SEQ ID NO: 217)
underlined, GlycoTag double underlined).
SEQ ID NO: 111
MKKIWLALAGLVLAFSASASGAVTEYEADKGVFP
TSNASAGVAAAADINGKAEEAFDLWNECAKACVL
DLKDGVRSSRMSVDPAIADTNGQGVLHYSMVLEG
GNDALKLAIDNALSITSDGLTIRLEGGVEPNKPV
RYSYTRQARGSWSLNWLVPIGHEKPSNIKVFIHE
LNAGNQLSHMSPIYTIEMGDELLAKLARDATFFV
RAHESNEMQPTLAISHAGVSVVMAQAQPRREKRW
SEWASGKVLCLLDPLDGVYNYLAQQRCNLDDTWE
GKIYRVLAGNPAKHDLDIKPTVISHRLHFPEGGS
LAALTAHQACHLPLEAFTRHRQPRGWEQLEQCGY
PVQRLVALYLAARLSWNQVDQVIRNALASPGSGG
DLGEAIREQPEQARLALTLAAAESERFVRQGTGN
DEAGAASADVVSLTCPVAAGECAGPADSGDALLE
RNYPTGAEFLGDGGDVSFSTRGTQNWTVERLLQA
HRQLEERGYVFVGYHGTFLEAAQSIVFGGVRARS
QDLDAIWRGFYIAGDPALAYGYAQDQEPDARGRI
RNGALLRVYVPRWSLPGFYRTGLTLAAPEAAGEV
ERLIGHPLPLRLDAITGPEEEGGRVTILGWPLAE
RTVVIPSAIPTDPRNVGGDLDPSSIPDKEQAISA
LPDYASQPGKPPREDLKHHHHHH

### SEQ ID NO:112

[0520] rEPA32 polynucleotide sequence—GlycoTag sequence SEQ ID NO: 145 in at residue 8274.

rEPA32 amino acid sequence-GlycoTag sequence
SEQ ID NO: 145 in at residue R274 (DsbA signal
sequence and GlycoTag underlined).
SEQ ID NO: 113
MKKIWLALAGLVLAFSASAAEEAFDLWNECAKAC
VLDLKDGVRSSRMSVDPAIADTNGQGVLHYSMVL
EGGNDALKLAIDNALSITSDGLTIRLEGGVEPNK
PVRYSYTRQARGSWSLNWLVPIGHEKPSNIKVFI
HELNAGNQLSHMSPIYTIEMGDELLAKLARDATF
FVRAHESNEMQPTLAISHAGVSVVMAQAQPRREK
RWSEWASGKVLCLLDPLDGVYNYLAQQRCNLDDT
WEGKIYRVLAGNPAKHDLDIKPTVISHRLHFPEG
GSLAALTAHQACHLPLEAFTSAVTGYYLNHGTWP
KDNTSAGVASSPTDIKHRQPRGWEQLEQCGYPVQ
RLVALYLAARLSWNQVDQVIRNALASPGSGGDLG
EAIREQPEQARLALTLAAAESERFVRQGTGNDEA
GAASADVVSLTCPVAAGECAGPADSGDALLERNY
PTGAEFLGDGGDVSFSTRGTQNWTVERLLQAHRQ
LEERGYVFVGYHGTFLEAAQSIVFGGVRARSQDL
DAIWRGFYIAGDPALAYGYAQDQEPDARGRIRNG
ALLRVYVPRWSLPGFYRTGLTLAAPEAAGEVERL
IGHPLPLRLDAITGPEEEGGRVTILGWPLAERTV
VIPSAIPTDPRNVGGDLDPSSIPDKEQAISALPD
YASQPGKPPREDLK

### SEQ ID NO:114

[0521] rEPA33 polynucleotide sequence—GlycoTag sequence SEQ ID NO: 145 in at residue S408.

rEPA33 amino acid sequence-GlycoTag sequence
SEQ ID NO: 145 in at residue S408 (DsbA signal
sequence and GlycoTag underlined).
SEQ ID NO: 115
MKKIWLALAGLVLAFSASAAEEAFDLWNECAKAC
VLDLKDGVRSSRMSVDPAIADTNGQGVLHYSMVL
EGGNDALKLAIDNALSITSDGLTIRLEGGVEPNK
PVRYSYTRQARGSWSLNWLVPIGHEKPSNIKVFI
HELNAGNQLSHMSPIYTIEMGDELLAKLARDATF
FVRAHESNEMQPTLAISHAGVSVVMAQAQPRREK
RWSEWASGKVLCLLDPLDGVYNYLAQQRCNLDDT
WEGKIYRVLAGNPAKHDLDIKPTVISHRLHFPEG
GSLAALTAHQACHLPLEAFTRHRQPRGWEQLEQC
GYPVQRLVALYLAARLSWNQVDQVIRNALASPGS
GGDLGEAIREQPEQARLALTLAAAESERFVRQGT
GNDEAGAASADVVSLTCPVAAGECAGPADSGDAL
LERNYPTGAEFLGDGGDVSAVTGYYLNHGTWPKD
NTSAGVASSPTDIKFSTRGTQNWTVERLLQAHRQ
LEERGYVFVGYHGTFLEAAQSIVFGGVRARSQDL
DAIWRGFYIAGDPALAYGYAQDQEPDARGRIRNG
ALLRVYVPRWSLPGFYRTGLTLAAPEAAGEVERL
IGHPLPLRLDAITGPEEEGGRVTILGWPLAERTV
VIPSAIPTDPRNVGGDLDPSSIPDKEQAISALPD
YASQPGKPPREDLK

### SEQ ID NO:116

[0522] rEPA34 polynucleotide sequence—GlycoTag sequence SEQ ID NO: 145 in at residue A519.

rEPA34 amino acid sequence - GlycoTag sequence
SEQ ID NO: 145 in at residue A519 (DsbA signal
sequence and GlycoTag underlined).
SEQ ID NO: 117
MKKIWLALAGLVLAFSASAAEEAFDLWNECAKACVLDLKDGVRSSRMSV
DPAIADTNGQGVLHYSMVLEGGNDALKLAIDNALSITSDGLTIRLEGGV
EPNKPVRYSYTRQARGSWSLNWLVPIGHEKPSNIKVFIHELNAGNQLSH
MSPIYTIEMGDELLAKLARDATFFVRAHESNEMQPTLAISHAGVSVVMA
QAQPRREKRWSEWASGKVLCLLDPLDGVYNYLAQQRCNLDDTWEGKIYR
VLAGNPAKHDLDIKPTVISHRLHFPEGGSLAALTAHQACHLPLEAFTRH
RQPRGWEQLEQCGYPVQRLVALYLAARLSWNQVDQVIRNALASPGSGGD
LGEAIREQPEQARLALTLAAAESERFVRQGTGNDEAGAASADVVSLTCP
VAAGECAGPADSGDALLERNYPTGAEFLGDGGDVSFSTRGTQNWTVERL
LQAHRQLEERGYVFVGYHGTFLEAAQSIVFGGVRARSQDLDAIWRGFYI
AGDPALAYGYAQDQEPDARGRIRNGALLRVYVPRWSLPGFYRTGLTLSA
VTGYYLNHGTWPKDNTSAGVASSPTDIKAPEAAGEVERLIGHPLPLRLD
AITGPEEEGGRVTILGWPLAERTVVIPSAIPTDPRNVGGDLDPSSIPDK
EQAISALPDYASQPGKPPREDLK

### SEQ ID NO:118

[0523] rEPA35 polynucleotide sequence—GlycoTag sequence SEQ ID NO: 146 in at residue S408.

rEPA35 amino acid sequence - GlycoTag sequence
SEQ ID NO: 146 in at residue S408 (DsbA signal
sequence and GlycoTag underlined).
SEQ ID NO: 119
MKKIWLALAGLVLAFSASAAEEAFDLWNECAKACVLDLKDGVRSSRMSV
DPAIADTNGQGVLHYSMVLEGGNDALKLAIDNALSITSDGLTIRLEGGV
EPNKPVRYSYTRQARGSWSLNWLVPIGHEKPSNIKVFIHELNAGNQLSH
MSPIYTIEMGDELLAKLARDATFFVRAHESNEMQPTLAISHAGVSVVMA
QAQPRREKRWSEWASGKVLCLLDPLDGVYNYLAQQRCNLDDTWEGKIYR
VLAGNPAKHDLDIKPTVISHRLHFPEGGSLAALTAHQACHLPLEAFTRH
RQPRGWEQLEQCGYPVQRLVALYLAARLSWNQVDQVIRNALASPGSGGD
LGEAIREQPEQARLALTLAAAESERFVRQGTGNDEAGAASADVVSLTCP
VAAGECAGPADSGDALLERNYPTGAEFLGDGGDVGTWPKDNTSAGVASS
PTDIKFSTRGTQNWTVERLLQAHRQLEERGYVFVGYHGTFLEAAQSIVF
GGVRARSQDLDAIWRGFYIAGDPALAYGYAQDQEPDARGRIRNGALLRV
YVPRWSLPGFYRTGLTLAAPEAAGEVERLIGHPLPLRLDAITGPEEEGG
RVTILGWPLAERTVVIPSAIPTDPRNVGGDLDPSSIPDKEQAISALPDY
ASQPGKPPREDLK

### SEQ ID NO:120

[0524] rEPA36 polynucleotide sequence—GlycoTag sequence SEQ ID NO: 146 in at residue A519.

rEPA36 amino acid sequence - GlycoTag sequence
SEQ ID NO: 146 in at residue A519 (DsbA signal
sequence and GlycoTag underlined).
SEQ ID NO: 121
MKKIWLALAGLVLAFSASAAEEAFDLWNECAKACVLDLKDGVRSSRMSV
DPAIADTNGQGVLHYSMVLEGGNDALKLAIDNALSITSDGLTIRLEGGV
EPNKPVRYSYTRQARGSWSLNWLVPIGHEKPSNIKVFIHELNAGNQLSH
MSPIYTIEMGDELLAKLARDATFFVRAHESNEMQPTLAISHAGVSVVMA
QAQPRREKRWSEWASGKVLCLLDPLDGVYNYLAQQRCNLDDTWEGKIYR
VLAGNPAKHDLDIKPTVISHRLHFPEGGSLAALTAHQACHLPLEAFTRH
RQPRGWEQLEQCGYPVQRLVALYLAARLSWNQVDQVIRNALASPGSGGD
LGEAIREQPEQARLALTLAAAESERFVRQGTGNDEAGAASADVVSLTCP
VAAGECAGPADSGDALLERNYPTGAEFLGDGGDVSFSTRGTQNWTVERL
LQAHRQLEERGYVFVGYHGTFLEAAQSIVFGGVRARSQDLDAIWRGFYI
AGDPALAYGYAQDQEPDARGRIRNGALLRVYVPRWSLPGFYRTGLTLGT
WPKDNTSAGVASSPTDIKAPEAAGEVERLIGHPLPLRLDAITGPEEEGG
RVTILGWPLAERTVVIPSAIPTDPRNVGGDLDPSSIPDKEQAISALPDY
ASQPGKPPREDLK

### SEQ ID NO:122

[0525] rEPA37 polynucleotide sequence—GlycoTag sequence SEQ ID NO: 146 in at residues 8274 and S408.

rEPA37 amino acid sequence - GlycoTag sequence
SEQ ID NO: 146 in at residues R274 and S408
(DsbA signal sequence and GlycoTags underlined).
SEQ ID NO: 123
MKKIWLALAGLVLAFSASAAEEAFDLWNECAKACVLDLKDGVRSSRMSV
DPAIADTNGQGVLHYSMVLEGGNDALKLAIDNALSITSDGLTIRLEGGV
EPNKPVRYSYTRQARGSWSLNWLVPIGHEKPSNIKVFIHELNAGNQLSH
MSPIYTIEMGDELLAKLARDATFFVRAHESNEMQPTLAISHAGVSVVMA
QAQPRREKRWSEWASGKVLCLLDPLDGVYNYLAQQRCNLDDTWEGKIYR
VLAGNPAKHDLDIKPTVISHRLHFPEGGSLAALTAHQACHLPLEAFTGT
WPKDNTSAGVASSPTDIKHRQPRGWEQLEQCGYPVQRLVALYLAARLSW
NQVDQVIRNALASPGSGGDLGEAIREQPEQARLALTLAAAESERFVRQG
TGNDEAGAASADVVSLTCPVAAGECAGPADSGDALLERNYPTGAEFLGD
GGDVGTWPKDNTSAGVASSPTDIKFSTRGTQNWTVERLLQAHRQLEERG
YVFVGYHGTFLEAAQSIVFGGVRARSQDLDAIWRGFYIAGDPALAYGYA
QDQEPDARGRIRNGALLRVYVPRWSLPGFYRTGLTLAAPEAAGEVERLI
GHPLPLRLDAITGPEEEGGRVTILGWPLAERTVVIPSAIPTDPRNVGGD
LDPSSIPDKEQAISALPDYASQPGKPPREDLK

### SEQ ID NO:124

[0526] rEPA38 polynucleotide sequence—GlycoTag sequence SEQ ID NO: 146 in at residues 8274 and A519.

rEPA38 amino acid sequence - GlycoTag sequence
SEQ ID NO: 146 in at residues R274 and A519
(DsbA signal sequence and GlycoTags underlined).
SEQ ID NO: 125
MKKIWLALAGLVLAFSASAAEEAFDLWNECAKACVLDLKDGVRSSRMSVD
PAIADTNGQGVLHYSMVLEGGNDALKLAIDNALSITSDGLTIRLEGGVEP
NKPVRYSYTRQARGSWSLNWLVPIGHEKPSNIKVFIHELNAGNQLSHMSP
IYTIEMGDELLAKLARDATFFVRAHESNEMQPTLAISHAGVSVVMAQAQP
RREKRWSEWASGKVLCLLDPLDGVYNYLAQQRCNLDDTWEGKIYRVLAGN
PAKHDLDIKPTVISHRLHFPEGGSLAALTAHQACHLPLEAFTGTWPKDNT
SAGVASSPTDIKHRQPRGWEQLEQCGYPVQRLVALYLAARLSWNQVDQVI
RNALASPGSGGDLGEAIREQPEQARLALTLAAAESERFVRQGTGNDEAGA
ASADVVSLTCPVAAGECAGPADSGDALLERNYPTGAEFLGDGGDVSFSTR
GTQNWTVERLLQAHRQLEERGYVFVGYHGTFLEAAQSIVFGGVRARSQDL
DAIWRGFYIAGDPALAYGYAQDQEPDARGRIRNGALLRVYVPRWSLPGFY
RTGLTLGTWPKDNTSAGVASSPTDIKAPEAAGEVERLIGHPLPLRLDAIT
GPEEEGGRVTILGWPLAERTVVIPSAIPTDPRNVGGDLDPSSIPDKEQAI
SALPDYASQPGKPPREDLK

### SEQ ID NO:126

[0527] rEPA39 polynucleotide sequence—GlycoTag sequence SEQ ID NO: 146 in at residues S408 and A519.

rEPA39 amino acid sequence - GlycoTag sequence
SEQ ID NO: 146 in at residues S408 and A519
(DsbA signal sequence and GlycoTags underlined).
SEQ ID NO: 127
MKKIWLALAGLVLAFSASAAEEAFDLWNECAKACVLDLKDGVRSSRMSV
DPAIADTNGQGVLHYSMVLEGGNDALKLAIDNALSITSDGLTIRLEGGV
EPNKPVRYSYTRQARGSWSLNWLVPIGHEKPSNIKVFIHELNAGNQLSH
MSPIYTIEMGDELLAKLARDATFFVRAHESNEMQPTLAISHAGVSVVMA
QAQPRREKRWSEWASGKVLCLLDPLDGVYNYLAQQRCNLDDTWEGKIYR
VLAGNPAKHDLDIKPTVISHRLHFPEGGSLAALTAHQACHLPLEAFTRH
RQPRGWEQLEQCGYPVQRLVALYLAARLSWNQVDQVIRNALASPGSGGD
LGEAIREQPEQARLALTLAAAESERFVRQGTGNDEAGAASADVVSLTCP
VAAGECAGPADSGDALLERNYPTGAEFLGDGGDVGTWPKDNTSAGVASS
PTDIKFSTRGTQNWTVERLLQAHRQLEERGYVFVGYHGTFLEAAQSIVF
GGVRARSQDLDAIWRGFYIAGDPALAYGYAQDQEPDARGRIRNGALLRV
YVPRWSLPGFYRTGLTLGTWPKDNTSAGVASSPTDIKAPEAAGEVERLI
GHPLPLRLDAITGPEEEGGRVTILGWPLAERTVVIPSAIPTDPRNVGGD
LDPSSIPDKEQAISALPDYASQPGKPPREDLK

### SEQ ID NO:128

[0528] rEPA40 polynucleotide sequence—GlycoTag sequence SEQ ID NO: 145 at N-terminus.

rEPA40 amino acid sequence - GlycoTag sequence
SEQ ID NO: 145 at N-terminus (DsbA signal
sequence underlined, GlycoTag double underlined).
SEQ ID NO: 129
MKKIWLALAGLVLAFSASASSAVTGYYLNHGTWPKDNSAGVASSPTDIK
AEEAFDLWNECAKACVLDLKDGVRSSRMSVDPAIADTNGQGVLHYSMVL
EGGNDALKLAIDNALSITSDGLTIRLEGGVEPNKPVRYSYTRQARGSWS
LNWLVPIGHEKPSNIKVFIHELNAGNQLSHMSPIYTIEMGDELLAKLAR
DATFFVRAHESNEMQPTLAISHAGVSVVMAQAQPRREKRWSEWASGKVL
CLLDPLDGVYNYLAQQRCNLDDTWEGKIYRVLAGNPAKHDLDIKPTVIS
HRLHFPEGGSLAALTAHQACHLPLEAFTRHRQPRGWEQLEQCGYPVQRL
VALYLAARLSWNQVDQVIRNALASPGSGGDLGEAIREQPEQARLALTLA
AAESERFVRQGTGNDEAGAASADVVSLTCPVAAGECAGPADSGDALLER
NYPTGAEFLGDGGDVSFSTRGTQNWTVERLLQAHRQLEERGYVFVGYHG
TFLEAAQSIVFGGVRARSQDLDAIWRGFYIAGDPALAYGYAQDQEPDAR
GRIRNGALLRVYVPRWSLPGFYRTGLTLAAPEAAGEVERLIGHPLPLRL
DAITGPEEEGGRVTILGWPLAERTVVIPSAIPTDPRNVGGDLDPSSIPD
KEQAISALPDYASQPGKPPREDLK

### SEQ ID NO:130

[0529] rEPA41 polynucleotide sequence—GlycoTag sequence SEQ ID NO: 146 in at residue 8274.

rEPA41 amino acid sequence - GlycoTag sequence
SEQ ID NO: 146 in at residue R274 (DsbA signal
sequence and GlycoTag underlined).
SEQ ID NO: 131
MKKIWLALAGLVLAFSASAAEEAFDLWNECAKACVLDLKDGVRSSRMSVD
PAIADTNGQGVLHYSMVLEGGNDALKLAIDNALSITSDGLTIRLEGGVEP
NKPVRYSYTRQARGSWSLNWLVPIGHEKPSNIKVFIHELNAGNQLSHMSP
IYTIEMGDELLAKLARDATFFVRAHESNEMQPTLAISHAGVSVVMAQAQP
RREKRWSEWASGKVLCLLDPLDGVYNYLAQQRCNLDDTWEGKIYRVLAGN
PAKHDLDIKPTVISHRLHFPEGGSLAALTAHQACHLPLEAFTGTWPKDNT
SAGVASSPTDIKHRQPRGWEQLEQCGYPVQRLVALYLAARLSWNQVDQVI
RNALASPGSGGDLGEAIREQPEQARLALTLAAAESERFVRQGTGNDEAGA
ASADVVSLTCPVAAGECAGPADSGDALLERNYPTGAEFLGDGGDVSFSTR
GTQNWTVERLLQAHRQLEERGYVFVGYHGTFLEAAQSIVFGGVRARSQDL
DAIWRGFYIAGDPALAYGYAQDQEPDARGRIRNGALLRVYVPRWSLPGFY
RTGLTLAAPEAAGEVERLIGHPLPLRLDAITGPEEEGGRVTILGWPLAER
TVVIPSAIPTDPRNVGGDLDPSSIPDKEQAISALPDYASQPGKPPREDLK

### SEQ ID NO:132

[0530] rEPA42 polynucleotide sequence—GlycoTag sequence SEQ ID NO: 145 in at residues 8274 and A519.

rEPA42 amino acid sequence - GlycoTag sequence
SEQ ID NO: 145 in at residues R274 and A519
(DsbA signal sequence and GlycoTags underlined).
SEQ ID NO: 133
MKKIWLALAGLVLAFSASAAEEAFDLWNECAKACVLDL
KDGVRSSRMSVDPAIADTNGQGVLHYSMVL
EGGNDALKLAIDNALSITSDGLTIRLEGGVEP
NKPVRYSYTRQARGSWSLNWLVPIGHEKPSNIKVFI
HELNAGNQLSHMSPIYTIEMGDELLAKLARDAT
FFVRAHESNEMQPTLAISHAGVSVVMAQAQPRREK
RWSEWASGKVLCLLDPLDGVYNYLAQQRCNLDDTWE
GKIYRVLAGNPAKHDLDIKPTVISHRLHFPEG
GSLAALTAHQACHLPLEAFTSAVTGYYLNHGTWPKDNT
SAGVASSPTDIKHRQPRGWEQLEQCGYPVQ
RLVALYLAARLSWNQVDQVIRNALASPGSGGDLGEAI
REQPEQARLALTLAAAESERFVRQGTGNDEA
GAASADVVSLTCPVAAGECAGPADSGDALLERNY
PTGAEFLGDGGDVSFSTRGTQNWTVERLLQAHRQ
LEERGYVFVGYHGTFLEAAQSIVFGGVRARSQDL
DAIWRGFYIAGDPALAYGYAQDQEPDARGRIRNG
ALLRVYVPRWSLPGFYRTGLSAVTGYYLNHGTW
PKDNTSAGVASSPTDIKAPEAAGEVERLIGHPL
PLRLDAITGPEEEGGRVTILGWPLAERTVVIPSAI
PTDPRNVGGDLDPSSIPDKEQAISALPDYASQP
GKPPREDLK

### SEQ ID NO:134

[0531] rEPA43 polynucleotide sequence—GlycoTag sequence SEQ ID NO: 140 at N-terminus and C-terminus.

rEPA43 amino acid sequence - GlycoTag sequence
SEQ ID NO: 140 at N-terminus and C-terminus
(DsbA signal sequence and
6xHis Tag (SEQ ID NO: 217)
underlined; GlycoTags double underlined).
SEQ ID NO: 135
MKKIWLALAGLVLAFSASASAVTEYYLNHGEWPGNNT
SAGVATSSEIKAEEAFDLWNECAKACVLDLK
DGVRSSRMSVDPAIADTNGQGVLHYSMVLEGGNDALK
LAIDNALSITSDGLTIRLEGGVEPNKPVRYS
YTRQARGSWSLNWLVPIGHEKPSNIKVFIHEL
NAGNQLSHMSPIYTIEMGDELLAKLARDATFFVRAH
ESNEMQPTLAISHAGVSVVMAQAQPRREKRWSEWASG
KVLCLLDPLDGVYNYLAQQRCNLDDTWEGKI
YRVLAGNPAKHDLDIKPTVISHRLHFPEGGSLAALTA
HQACHLPLEAFTRHRQPRGWEQLEQCGYPVQ
RLVALYLAARLSWNQVDQVIRNALASPGSGGDLGE
AIREQPEQARLALTLAAAESERFVRQGTGNDEA
GAASADVVSLTCPVAAGECAGPADSGDALLERNYPT
GAEFLGDGGDVSFSTRGTQNWTVERLLQAHRQ
LEERGYVFVGYHGTFLEAAQSIVFGGVRARSQDLD
AIWRGFYIAGDPALAYGYAQDQEPDARGRIRNG
ALLRVYVPRWSLPGFYRTGLTLAAPEAAGEVERLIGH
PLPLRLDAITGPEEEGGRVTILGWPLAERTV
VIPSAIPTDPRNVGGDLDPSSIPDKEQAISALPDY
ASQPGKPPREDLKSAVTEYYLNHGEWPGNNTSA
GVATSSEIKHHHHHH
Mature rEPA43 amino acid sequence (i.e., signal
sequence removed) - GlycoTag sequence SEQ ID
NO: 140 at N-terminus and C-terminus (6xHis
Tag (SEQ ID NO: 217) underlined;
GlycoTags double underlined).
SEQ ID NO: 136
SAVTEYYLNHGEWPGNNTSAGVATSSEIKAEEAFDLW
NECAKACVLDLKDGVRSSRMSVDPAIADTNG
QGVLHYSMVLEGGNDALKLAIDNALSITSDGLTI
RLEGGVEPNKPVRYSYTRQARGSWSLNWLVPIGH
EKPSNIKVFIHELNAGNQLSHMSPIYTIEMGDELLAK
LARDATFFVRAHESNEMQPTLAISHAGVSVV
MAQAQPRREKRWSEWASGKVLCLLDPLDGVYNYLAQQRCNL
DDTWEGKIYRVLAGNPAKHDLDIKPTV
ISHRLHFPEGGSLAALTAHQACHLPLEAFTRHR
QPRGWEQLEQCGYPVQRLVALYLAARLSWNQVDQV
IRNALASPGSGGDLGEAIREQPEQARLALTLAAAE
SERFVRQGTGNDEAGAASADVVSLTCPVAAGEC
AGPADSGDALLERNYPTGAEFLGDGGDVSFST
RGTQNWTVERLLQAHRQLEERGYVFVGYHGTFLEAA
QSIVFGGVRARSQDLDAIWRGFYIAGDPALAYGYA
QDQEPDARGRIRNGALLRVYVPRWSLPGFYRTG
LTLAAPEAAGEVERLIGHPLPLRLDAITGPEEEGGR
VTILGWPLAERTVVIPSAIPTDPRNVGGDLDP
SSIPDKEQAISALPDYASQPGKPPREDLKSAV
TEYYLNHGEWPGNNTSAGVATSSEIKHHHHHH

### SEQ ID NO: 137

[0532] Neisseria meningitidis MC58 PilE amino acid sequence (mature sequence; signal sequence removed). Corresponds to NCBI Accession NP_273084.1.

Neisseria meningitidis MC58 PilE amino acid
sequence (signal sequence underlined).
Corresponds to NCBI Accession NP_273084.1.
SEQ ID NO: 138
MNTLQKGFTLIELMIVIAIVGILAAVALPAYQDYTARA
QVSEAILLAEGQKSAVTEYYLNHGEWPGNN
TSAGVATSSEIKGKYVKSVEVKNGVVTAQMASSNVN
NEIKGKKLSLWAKRQNGSVKWFCGQPVTRDKA
KAANDDVTAAAAANGKKIDTKHLPSTCRDASDAS
Neisseria meningitidis MC58 PilE polynucleotide
sequence. Corresponds to 17741-17229 of NCBI
Reference Sequence NC_003112.2.
SEQ ID NO: 139
ATGAACACCCTTCAAAAAGGTTTTACCCTTATCGA
GCTGATGATTGTGATTGCCATCGTCGGCATTTT
GGCGGCAGTCGCCCTTCCTGCTTATCAAGACTACACAG
CCCGCGCACAAGTTTCCGAAGCCATTCTTT
TGGCCGAAGGTCAAAAATCAGCCGTTACCGAGTATTACCT
GAATCACGGCGAATGGCCCGGCAACAAC
ACTTCTGCCGGCGTGGCAACCTCCTCTGAAATCA
AAGGCAAATATGTTAAAAGCGTTGAAGTCAAAAA
CGGCGTCGTTACCGCCCAAATGGCTTCAAGCAAC
GTAAACAACGAAATCAAAGGCAAAAAACTCTCCC
TGTGGGCCAAGCGTCAAAACGGTTCGGTAAAATGG
TTCTGCGGACAGCCGGTTACGCGCGACAAAGCC
AAAGCCGCCAACGACGACGTTACCGCCGCCGCCGCC
GCCAACGGTAAGAAGATTGACACCAAGCACCT
GCCGTCAACCTGCCGCGACGCAAGTGATGCCAGCTAA

### SEQ ID NO: 140

[0533] Neisseria meningitidis PilE GlycoTag amino acid sequence (corresponding to residues 45-73 of SEQ ID NO: 137; 29 amino acid long). E.g. Ser Ala Val Thr Glu Tyr Tyr Leu Asn His Gly Glu Trp Pro Gly Asn Asn Thr Ser Ala Gly Val Ala Thr Ser Ser Glu Ile Lys

### SEQ ID NO: 141

[0534] Neisseria meningitidis PilE GlycoTag amino acid sequence (corresponding to residues 55-73 of SEQ ID NO: 137; 19 amino acid long). E.g. Gly Glu Trp Pro Gly Asn Asn Thr Ser Ala Gly Val Ala Thr Ser Ser Glu Ile Lys

### SEQ ID NO: 142

[0535] Neisseria meningitidis PilE GlycoTag amino acid sequence (corresponding to residues 55-66 of SEQ ID NO: 137; 12 amino acid long). E.g. Gly Glu Trp Pro Gly Asn Asn Thr Ser Ala Gly Val

### SEQ ID NO: 143

[0536] Neisseria gonorrhoeae Pilin (NgPilin) amino acid sequence. Corresponds to NCBI GenBank CNT62005.1.

### SEQ ID NO: 144

[0537] Neisseria gonorrhoeae Pilin (NgPilin) polynucleotide sequence. Corresponds to NCBI GenBank CNT62005.1.

### SEQ ID NO: 145

[0538] Neisseria gonorrhoeae GlycoTag amino acid sequence (corresponding to residues 52-81 of SEQ ID NO: 143; 30 amino acid long). E. g. Ser Ala Val Thr Gly Tyr Tyr Leu Asn His Gly Thr Trp Pro Lys Asp Asn Thr Ser Ala Gly Val Ala Ser Ser Pro Thr Asp Ile Lys

### SEQ ID NO: 146

[0539] Neisseria gonorrhoeae GlycoTag amino acid sequence (corresponding to residues 62-81 of SEQ ID NO: 143; 20 amino acid long). E. g. Gly Thr Trp Pro Lys Asp Asn Thr Ser Ala Gly Val Ala Ser Ser Pro Thr Asp Ile Lys

### SEQ ID NO: 147

[0540] Neisseria gonorrhoeae GlycoTag amino acid sequence (corresponding to residues 62-73 of SEQ ID NO: 143; 12 amino acid long). E.g. Gly Thr Trp Pro Lys Asp Asn Thr Ser Ala Gly Val

### SEQ ID NO: 148

[0541] Neisseria lactamica 020-06 Pilin (NlPilin) amino acid sequence. Corresponds to NCBI GenBank CBN86420.1.

### SEQ ID NO: 149

[0542] Neisseria lactamica 020-06 Pilin (NlPilin) polynucleotide sequence. Corresponds to NCBI GenBank CBN86420.1.

### SEQ ID NO: 150

[0543] Neisseria lactamica 020-06 GlycoTag amino acid sequence (corresponding to residues 52-86 of SEQ ID NO: 148; 35 amino acid long). E.g. Ala Ala Val Val Glu Tyr Tyr Ser Asp Asn Gly Thr Phe Pro Ala Gln Asn Ala Ser Ala Gly Ile Ala Thr Ala Ser Ala Ile Thr Gly Lys Tyr Val Ala Lys

### SEQ ID NO: 151

[0544] Neisseria lactamica 020-06 GlycoTag amino acid sequence (corresponding to residues 62-73 of SEQ ID NO: 148; 12 amino acid long). E.g. Gly Thr Phe Pro Ala Gln Asn Ala Ser Ala Gly Ile

### SEQ ID NO: 152

[0545] Neisseria elongata subsp. glycolytica ATCC 29315 Pilin (NePilin) polynucleotide sequence. Corresponds to NCBI GenBank EFE49588.1.

### SEQ ID NO:153

[0546] Neisseria elongata subsp. glycolytica ATCC 29315 Pilin (NePilin) amino acid sequence. Corresponds to NCBI GenBank EFE49588.1. 100% identity to SEQ ID NO: 186.

### SEQ ID NO: 154

[0547] Neisseria elongata subsp. glycolytica ATCC 29315 GlycoTag amino acid sequence (corresponding to residues 52-97 of SEQ ID NO: 153; 45 amino acid long).

### SEQ ID NO: 155

[0548] Neisseria bacilliformis ATCC BAA-1200 (NbPilin) polynucleotide sequence. Corresponds to NCBI GenBank EGF11985.1.

### SEQ ID NO:156

[0549] Neisseria bacilliformis ATCC BAA-1200 (NbPilin) amino acid sequence. Corresponds to NCBI GenBank EGF11985.1.

### SEQ ID NO: 157

[0550] Neisseria bacilliformis ATCC BAA-1200 GlycoTag amino acid sequence (corresponding to residues 57-93 of SEQ ID NO: 156; 37 amino acid long).

### SEQ ID NO: 158

[0551] Neisseria mucosa ATCC 25996 (NmuPilin) polynucleotide sequence. Corresponds to NCBI GenBank EFC89512.1.

### SEQ ID NO:159

[0552] Neisseria mucosa ATCC 25996 (NmuPilin) amino acid sequence. Corresponds to NCBI GenBank EFC89512.1.

### SEQ ID NO: 160

[0553] Neisseria mucosa ATCC 25996 GlycoTag amino acid sequence (corresponding to residues 52-92 of SEQ ID NO: 159; 41 amino acids long).

### SEQ ID NO: 161

[0554] Neisseria shayeganii 871 (NsPilin) polynucleotide sequence. Corresponds to NCBI GenBank EGY51595.1.

### SEQ ID NO:162

[0555] Neisseria shayeganii 871 (NsPilin) amino acid sequence. Corresponds to NCBI GenBank EGY51595.1. 100% identity to SEQ ID NOs: 177 and 179.

### SEQ ID NO: 163

[0556] Neisseria shayeganii 871 GlycoTag amino acid sequence (corresponding to residues 53-83 of SEQ ID NO: 162; 31 amino acids long). E.g. Gly Ala Val Thr Glu Tyr Glu Ala Asp Lys Gly Val Phe Pro Thr Ser Asn Ala Ser Ala Gly Val Ala Ala Ala Ala Asp Ile Asn Gly Lys

### SEQ ID NO: 164

[0557] Neisseria shayeganii 871 GlycoTag amino acid sequence (corresponding to residues 63-74 of SEQ ID NO: 162; 12 amino acids long). E.g. Gly Val Phe Pro Thr Ser Asn Ala Ser Ala Gly Val

### SEQ ID NO: 165

[0558] Neisseria lactamica ATCC 23970 Pilin amino acid sequence. Corresponds to NCBI GenBank EEZ75637.1.

### SEQ ID NO: 166

[0559] Neisseria gonorrhoeae F62 Pilin amino acid sequence. Corresponds to NCBI GenBank EFF40919.1.

### SEQ ID NO: 167

[0560] Neisseria cinereal ATCC 14685 Pilin amino acid sequence. Corresponds to NCBI GenBank EEZ70774.1.

### SEQ ID NO: 168

[0561] Neisseria cinereal ATCC 14685 Pilin amino acid sequence. Corresponds to NCBI GenBank EEZ70775.1.

### SEQ ID NO: 169

[0562] Neisseria mucosa Pilin amino acid sequence. Corresponds to NCBI GenBank KGJ31398.1.

### SEQ ID NO: 170

[0563] Neisseria mucosa Pilin amino acid sequence. Corresponds to NCBI GenBank KGJ31397.1.

### SEQ ID NO: 171

[0564] Neisseria flavescens NRL30031/H210 Pilin amino acid sequence. Corresponds to NCBI GenBank EEG33288.1.

### SEQ ID NO: 172

[0565] Neisseria mucosa ATCC 25996 Pilin amino acid sequence. Corresponds to NCBI GenBank EFC89512.1.

### SEQ ID NO: 173

[0566] Neisseria mucosa ATCC 25996 Pilin amino acid sequence. Corresponds to NCBI GenBank EFC89511.1.

### SEQ ID NO: 174

[0567] Neisseria sp oral taxon 014 str. F0314 Pilin amino acid sequence. Corresponds to NCBI GenBank EFI23295.1.

### SEQ ID NO: 175

[0568] Neisseria sp oral taxon 014 str. F0314 Pilin amino acid sequence. Corresponds to NCBI GenBank EFI23294.1.

### SEQ ID NO: 176

[0569] Neisseria arctica Pilin amino acid sequence. Corresponds to NCBI GenBank KLT73057.1.

### SEQ ID NO: 177

[0570] Neisseria shayeganii 871 Pilin amino acid sequence. Corresponds to NCBI GenBank EGY51595.1. 100% identity to SEQ ID NOs: 162 and 179.

### SEQ ID NO: 178

[0571] Neisseria shayeganii 871 Pilin amino acid sequence. Corresponds to NCBI GenBank. EGY51594 (=ID 180)

### SEQ ID NO: 179

[0572] Neisseria shayeganii 871 Pilin amino acid sequence. Corresponds to NCBI GenBank EGY51595.1. 100% identity to SEQ ID NOs: 162 and 177.

### SEQ ID NO: 180

[0573] Neisseria shayeganii 871 Pilin amino acid sequence. Corresponds to NCBI GenBank EGY51594.1.

### SEQ ID NO: 181

[0574] Neisseria sp. 83E34 Pilin amino acid sequence. Corresponds to NCBI GenBank KPN71218.1.

### SEQ ID NO: 182

[0575] Neisseria sp. 83E34 Pilin amino acid sequence. Corresponds to NCBI GenBank KPN71186.1.

### SEQ ID NO: 183

[0576] Neisseria wadsworthii 9715 Pilin amino acid sequence. Corresponds to NCBI GenBank EGZ51246.1.

### SEQ ID NO:184

[0577] Neisseria wadsworthii 9715 Pilin amino acid sequence. Corresponds to NCBI GenBank EGZ51247.1.

### SEQ ID NO: 185

[0578] Neisseria elongata subsp. glycolytica ATCC 29315 Pilin amino acid sequence. Corresponds to NCBI GenBank EFE49587.1.

### SEQ ID NO: 186

[0579] Neisseria elongata subsp. glycolytica ATCC 29315 Pilin amino acid sequence. Corresponds to NCBI GenBank EFE49588.1. 100% identity to SEQ ID NO: 153.

### SEQ ID NO: 187

[0580] Neisseria bacilliformis ATCC BAA-1200 Pilin amino acid sequence. Corresponds to NCBI GenBank EGF04823.1.

### SEQ ID NO: 188

[0581] Neisseria bacilliformis ATCC BAA-1200 Pilin amino acid sequence. Corresponds to NCBI GenBank EGF11985.1.

### SEQ ID NO: 189

[0582] Neisseria bacilliformis ATCC BAA-1200 Pilin amino acid sequence. Corresponds to NCBI GenBank EGF12096.1.

### SEQ ID NO: 190

[0583] Neisseria sp. oral taxon 020 str. F0370 Pilin amino acid sequence. Corresponds to NCBI GenBank EKY04118.1.

### SEQ ID NO: 191

[0584] Neisseria sp. oral taxon 020 str. F0370 Pilin amino acid sequence. Corresponds to NCBI GenBank EKY04120.1.

### SEQ ID NO: 192

[0585] Neisseria sp. 74A18 Pilin amino acid sequence. Corresponds to NCBI GenBank KPN73545.1.

### SEQ ID NO: 193

[0586] Neisseria sp. 74A18 Pilin amino acid sequence. Corresponds to NCBI GenBank KPN73546.1.

### SEQ ID NO: 194

[0587] Neisseria weaver ATCC 51223 Pilin amino acid sequence. Corresponds to NCBI GenBank EGV37979.1.

### SEQ ID NO: 195

[0588] Neisseria macacae ATCC 33926 Pilin amino acid sequence. Corresponds to NCBI GenBank EGQ74605.1.

### SEQ ID NO: 196

[0589] Neisseria macacae ATCC 33926 Pilin amino acid sequence. Corresponds to NCBI GenBank EGQ74606.1.

### SEQ ID NO: 197

[0590] AcrA polynucleotide sequence (including pelB signal sequence).

AcrA amino acid sequence
(pelB signal sequence underlined).
SEQ ID NO: 198
MKYLLPTAAAGLLLLAAQPAMAMHMSKEEAPKIQMP
PQPVTTMSAKSEDLPLSFTYPAKLVSDYDVII
KPQVSGVIVNKLFKAGDKVKKGQTLFIIEQDKFKA
SVDSAYGQALMAKATFENASKDFNRSKALFSKS
AISQKEYDSSLATFNNSKASLASARAQLANARIDLDHTE
IKAPFDGTIGDALVNIGDYVSASTTELVR
VTNLNPIYADFFISDTDKLNLVRNTQSGKWDLDS
IHANLNLNGETVQGKLYFIDSVIDANSGTVKAKA
VFDNNNSTLLPGAFATITSEGFIQKNGFKVPQIGV
KQDQNDVYVLLVKNGKVEKSSVHISYQNNEYAI
IDKGLQNGDKIILDNFKKIQVGSEVKEIGAQLE
mAcrA amino acid sequence - GlycoTag sequence
SEQ ID NO: 140 at C-terminus (pelB signal
sequence and GlycoTag SEQ ID NO: 140 underlined;
6,(1-lis-tag (SEQ ID NO: 217) double underlined).
SEQ ID NO: 199
MKYLLPTAAAGLLLLAAQPAMAMHMSKEEAPKIQMP
PQPVTTMSAKSEDLPLSFTYPAKLVSDYDVII
KPQVSGVIVNKLFKAGDKVKKGQTLFIIEQDKFK
ASVDSAYGQALMAKATFENASKDFLRSKALFSKS
AISQKEYDSSLATFNNSKASLASARAQLANARIDLDHTE
IKAPFDGTIGDALVNIGDYVSASTTELVR
VTNLNPIYADFFISDTDKLNLVRNTQSGKWDL
DSIHANLNLNGETVQGKLYFIDSVIDANSGTVKAKA
VFDNNNSTLLPGAFATITSEGFIQKNGFKVPQIGVK
QDQNDVYVLLVKNGKVEKSSVHISYQNNEYAI
IDKGLQNGDKIILDNFKKIQVGSEVKEIGAQLE
SAVTEYYLNHGEWPGNNTSAGVATSSEIKHHHHHH

### SEQ ID NO: 200

[0591] PcrV polynucleotide sequence (including LtIIb signal sequence).

PcrV amino acid sequence
(LtIIb signal sequence underlined).
SEQ ID NO: 201
MSFKKIIKAFVIMAALVSVQAHAAEVRNLNAARELFLDELLAASAAPAS
AEQEELLALLRSERIVLAHAGQPLSEAQVLKALAWLLAANPSAPPGQGL
EVLREVLQARRQPGAQWDLREFLVSAYFSLHGRLDEDVIGVYKDVLQTQ
DGKRKALLDELKALTAELKVYSVIQSQINAALSAKQGIRIDAGGIDLVD
PTLYGYAVGDPRWKDSPEYALLSNLDTFSGKLSIKDFLSGSPKQSGELK
GLSDEYPFEKDNNPVGNFATTVSDRSRPLNDKVNEKTTLLNDTSSRYNS
AVEALNRFIQKYDSVLRDILSAIGS
mPcrV amino acid sequence - GlycoTag sequence
SEQ ID NO: 140 at C-terminus (LtIIb signal
sequence and GlycoTag underlined; 6,(1-lis-
tag (SEQ ID NO: 217) double underlined).
SEQ ID NO: 202
MSFKKIIKAFVIMAALVSVQAHAAEVRNLNAARELFLDELLAASAAPAS
AEQEELLALLRSERIVLAHAGQPLSEAQVLKALAWLLAANPSAPPGQGL
EVLREVLQARRQPGAQWDLREFLVSAYFSLHGRLDEDVIGVYKDVLQTQ
DGKRKALLDELKALTAELKVYSVIQSQINAALSAKQGIRIDAGGIDLVD
PTLYGYAVGDPRWKDSPEYALLSNLDTFSGKLSIKDFLSGSPKQSGELK
GLSDEYPFEKDNNPVGNFATTVSDRSRPLNDKVNEKTTLLNDTSSRYNS
AVEALNRFIQKYDSVLRDILSAIGSSAVTEYYLNHGEWPGNNTSAGVAT
SSEIKHHHHHH

### SEQ ID NO: 203

[0592] Crm197 polynucleotide sequence (including DsbA signal sequence and GlycoTag sequence SEQ ID NO: 140 at C-terminus).

mCrm197 amino acid sequence - GlycoTag
sequence SEQ ID NO: 140 at C-terminus (DsbA signal
sequence and GlycoTag underlined; 6xHis-
tag (SEQ ID NO: 217) double underlined).
SEQ ID NO: 204
MKKIWLALAGLVLAFSASAGADDVVDSSKSFVMENFSSYHGT
KPGYVDSIQKGIQKPKSGTQGNYDDD
WKEFYSTDNKYDAAGYSVDNENPLSGKAGGVVKVTYPGLTKV
LALKVDNAETIKKELGLSLTEPLMEQ
VGTEEFIKRFGDGASRVVLSLPFAEGSSSVEYINNWEQA
KALSVELEINFETRGKRGQDAMYEYMAQA
CAGNRVRRSVGSSLSCINLDWDVIRDKTKTKIESLKEH
GPIKNKMSESPNKTVSEEKAKQYLEEFHQT
ALEHPELSELKTVTGTNPVFAGANYAAWAVNVAQVIDSET
ADNLEKTTAALSILPGIGSVMGIADGAV
HHNTEEIVAQSIALSSLMVAQAIPLVGELVDIGFAAYNFVES
IINLFQVVHNSYNRPAYSPGHKTQPF
LHDGYAVSWNTVEDSIIRTGFQGESGHDIKITAENTPLPIAGVL
LPTIPGKLDVNKSKTHISVNGRKI
RMRCRAIDGDVTFCRPKSPVYVGNGVHANLHVAFHRSSSEK
IHSNEISSDSIGVLGYQKTVDHTKVNS
KLSLFFEIKSGSSAVTEYYLNHGEWPGNNTSAGVAT
SSEIKHHHHHH
Crm197 amino acid sequence
(DsbA signal sequence underlined).
SEQ ID NO: 205
MKKIWLALAGLVLAFSASAGADDVVDSSKSFVMENFSSYHGTKPGYVDS
IQKGIQKPKSGTQGNYDDD
WKEFYSTDNKYDAAGYSVDNENPLSGKAGGVVKVTYPGLTKVLALKVDNA
ETIKKELGLSLTEPLMEQ
VGTEEFIKRFGDGASRVVLSLPFAEGSSSVEYINNWEQAKALSVELEINF
ETRGKRGQDAMYEYMAQA
CAGNRVRRSVGSSLSCINLDWDVIRDKTKTKIESLKEHGPIKNKMSESPN
KTVSEEKAKQYLEEFHQT
ALEHPELSELKTVTGTNPVFAGANYAAWAVNVAQVIDSETADNLEKTTAA
LSILPGIGSVMGIADGAV
HHNTEEIVAQSIALSSLMVAQAIPLVGELVDIGFAAYNFVESIINL
FQVVHNSYNRPAYSPGHKTQPF
LHDGYAVSWNTVEDSIIRTGFQGESGHDIKITAENTPLPIAGVLLPTIPG
KLDVNKSKTHISVNGRKI
RMRCRAIDGDVTFCRPKSPVYVGNGVHANLHVAFHRSSSEKIHSNEIS
SDSIGVLGYQKTVDHTKVNS
KLSLFFEIKSGS

### SEQ ID NO: 206

[0593] m2Crm197 polynucleotide sequence (including DsbA signal sequence and GlycoTag sequence SEQ ID NO: 140 at N-terminus and C-terminus)

M2Crm197 amino acid sequence - GlycoTag sequence
SEQ ID NO: 140 at N-terminus and C-terminus
(DsbA signal sequence and 6,(Elis-tag (SEQ ID
NO: 217) underlined; GlycoTags double underlined).
SEQ ID NO: 207
MKKIWLALAGLVLAFSASASAVTEYYLNHGEWPGNNT
SAGVATSSEIKGADDVVDSSKSFVMENFSSY
HGTKPGYVDSIQKGIQKPKSGTQGNYDDDWKEFYST
DNKYDAAGYSVDNENPLSGKAGGVVKVTYPGL
TKVLALKVDNAETIKKELGLSLTEPLMEQVGTEE
FIKRFGDGASRVVLSLPFAEGSSSVEYINNWEQA
KALSVELEINFETRGKRGQDAMYEYMAQACAGNRVRR
SVGSSLSCINLDWDVIRDKTKTKIESLKEHG
PIKNKMSESPNKTVSEEKAKQYLEEFHQTALE
HPELSELKTVTGTNPVFAGANYAAWAVNVAQVIDSE
TADNLEKTTAALSILPGIGSVMGIADGAVHH
NTEEIVAQSIALSSLMVAQAIPLVGELVDIGFAAYNF
VESIINLFQVVHNSYNRPAYSPGHKTQPFLHDGYAVS
WNTVEDSIIRTGFQGESGHDIKITAENTPLP
IAGVLLPTIPGKLDVNKSKTHISVNGRKIRMRC
RAIDGDVTFCRPKSPVYVGNGVHANLHVAFHRSSS
EKIHSNEISSDSIGVLGYQKTVDHTKVNSKLSLFFE
IKSGSSAVTEYYLNHGEWPGNNTSAGVATSSE
IKHHHHHH

### SEQ ID NO: 208

[0594] Plesiomonas shigelloides O17 (i.e., Shigella sonnei) O-antigen WbgT amino acid sequence corresponding to NCBI GenBank Accession No. AAG17408.1. [102]

### SEQ ID NO: 209

[0595] Plesiomonas shigelloides O17 (i.e., Shigella sonnei) O-antigen WbgU amino acid sequence corresponding to NCBI GenBank Accession No. AAG17409.1. [102]

### SEQ ID NO: 210

[0596] Plesiomonas shigelloides O17 (i.e., Shigella sonnei) O-antigen Wzx amino acid sequence corresponding to NCBI GenBank Accession No. AAG17410.1. [102]

### SEQ ID NO: 211

[0597] Plesiomonas shigelloides O17 (i.e., Shigella sonnei) O-antigen Wzy amino acid sequence corresponding to NCBI GenBank Accession No. AAG17411.1. [102]

### SEQ ID NO: 212

[0598] Plesiomonas shigelloides O17 (i.e., Shigella sonnei) O-antigen WbgV amino acid sequence corresponding to NCBI GenBank Accession No. AAG17412.1. [102]

### SEQ ID NO: 213

[0599] Plesiomonas shigelloides O17 (i.e., Shigella sonnei) O-antigen WbgW amino acid sequence corresponding to NCBI GenBank Accession No. AAG17413.1. [102]

### SEQ ID NO: 214

[0600] Plesiomonas shigelloides O17 (i.e., Shigella sonnei) O-antigen WbgX amino acid sequence corresponding to NCBI GenBank Accession No. AAG17414.1. [102]

### SEQ ID NO: 215

[0601] Plesiomonas shigelloides O17 (i.e., Shigella sonnei) O-antigen WbgY amino acid sequence corresponding to NCBI GenBank Accession No. AAG17415.1. [102]

### SEQ ID NO: 216

[0602] Plesiomonas shigelloides O17 (i.e., Shigella sonnei) O-antigen WbgZ amino acid sequence corresponding to NCBI GenBank Accession No. AAG17416.1. [102]

### SEQ ID NO: 217

### 6×His-tag

### TABLE OF REFERENCES

[0603] [1] Faridmoayer et al., “Functional Characterization of Bacterial Oligosaccharyltransferases Involved in O-Linked Protein Glycosylation,” J. Bacteriology, pp. 8088-8098, 2007.
[0604] [2] Tan et al., “Sugar coating: bacterial protein glycosylation and host-microbe interactions,” Trends in Bioch. Sci., vol. 40, no. 7, pp. 342-350, 2015.
[0605] [3] Faridmoayer et al., “Extreme Substrate Promiscuity of the Neisseria Oligosaccharyl Transferase Involved in Protein O-Glycosylation,” J. Biol. Chem., vol. 283, no. 50, pp. 34596-34604, 2008.
[0606] [4] Pan et al., “Biosynthesis of Conjugate Vaccines Using an O-Linked Glycosylation System,” mBio, vol. 7, no. 2, pp. e00443-16, 2016.
[0607] [5] Ihssen et al., “Production of glycoprotein vaccines in Escherichia coli,” Microbial Cell Factories, vol. 9, p. 61, 13 total pages, 2010.
[0608] [6] Institute of Biotechnology, Academy of Military Medical Sciences, China WO/2016/082597 (Jun. 2, 2016; English language equivalent EP3225690).
[0609] [7] Vik et al., “Broad spectrum O-linked protein glycosylation in the human pathogen Neisseria gonorrhoeae,” PNAS, vol. 106, no. 11, pp. 4447-4452, 2009.
[0610] [8] Ravenscroft et al., “Purification and characterization of a Shigella Conjugate Vaccine, Produced by Glycoengineering Escherichia coli,” Glycobiology, vol. 26, no. 1, pp. 51-62, 2016.
[0611] [9] Glycovaxyn AG, U.S. Pat. No. 8,846,342 (Sep. 30, 2014).
[0612] [10] Glycovaxyn AG, U.S. Pat. No. 8,895,014 (Nov. 25, 2014).
[0613] [11] ETH Zurich, U.S. Pat. No. 8,753,864 (Jun. 17, 2014).
[0614] [12] Glycovaxyn AG, U.S. Pat. No. 9,585,950 (Mar. 7, 2017).
[0615] [13] Wacker et al., “Substrate specificity of bacterial oligosaccharyltransferase suggests a common transfer mechanism for the bacterial and eukaryotic systems,” PNAS, vol. 103, pp. 7088-7093, 2006.
[0616] [14] Bentley, “Genetic analysis of the capsular biosynthetic locus from all 90 pneumococcal serotypes,” PLoS Gen, vol. 2, p. e31, 2006.
[0617] [15] Borud et al., “Genetic, Structural, and Antigenic Analysis of Glycan Diversity in the O-Linked Protein Glycosylation Systems of Human Neisseria Species,” J. Bacteriology, vol. 192, no. 11, pp. 2816-2829, 2010.
[0618] [16] Li et al., “Understanding protein glycosylation pathways in bacteria,” Future Microbiol., vol. 12, no. 1, pp. 59-72, 2017.
[0619] [17] Schulz et al., “Identification of Bacterial Protein O-Oligosaccharyltransferases and their glycoprotein substrates,” PLoS One, vol. 8, no. 5, p. e62768, 2013.
[0620] [18] Ruan et al., “The Waal, O-antigen lipopolysaccharide ligase has features in common with metal ion-independent inverting glycosyltransferases,” Glycobiology, vol. 22, no. 2, pp. 288-299, 2012.
[0621] [19] Aas et al., “Neisseria gonorrhoeae O-linked pilin glycosylation: functional analyses define both the biosynthetic pathway and glycan structure,” Molecular Microbiology, vol. 65, no. 3, pp. 607-624, 2007.
[0622] [20] Samuel & Reeves, “Biosynthesis of O-antigens: genes and pathways involved in nucleotide sugar precursor synthesis and O-antigen assembly,” Carbohydrate Research, vol. 338, pp. 2503-2519, 2003.
[0623] [21] May, “Percent Sequence Identity: The Need to Be Explicit,” Structure, vol. 12, pp. 737-738, 2004.
[0624] [22] Karlin et al., “Methods for assessing the statistical significance of molecular sequence features by using general scoring schemes,” PNAS, vol. 87, pp. 2264-2268, 1990.
[0625] [23] Karlin & Altschul, “Applications and statistics for multiple high-scoring segments in molecular sequences,” PNAS, vol. 90, pp. 5873-5877, 1993.
[0626] [24] Altschul et al., “Gapped BLAST and PSI-BLAST: a new generation of protein database search programs,” Nucleic Acids Research, vol. 25, no. 17, pp. 3389-3402, 1997.
[0627] [25] Altschul & Gish, “Local Alignment Statistics,” in Multiple Alignment and Phylogenetic Trees (Volume 266), 1996, pp. 460-480.
[0628] [26] Needleman & Wunsch, “A General Method Applicable to the Search for Similarities in the Amino Acid Sequence of Two Proteins,” J. Mol. Biol., vol. 48, pp. 443-453, 1970.
[0629] [27] Myers & Miller, “Optimal Alignments in Linear Space,” Comput Appl Biosci (CABIOS), vol. 4, no. 1, pp. 11-17, 1988.
[0630] [28] Abeyrathne et al., “Functional Characterization of WaaL, a Ligase Associated with Linking O-Antigen Polysaccharide to the Core of Pseudomonas aeruginosa Lipopolysaccharide,” J. Bacteriol., vol. 187, no. 9, pp. 3002-3012, 2005.
[0631] [29] University of Alberta, U.S. Pat. No. 9,238,830 (Jan. 19, 2016).
[0632] [30] Musumeci et al., “In Vitro Activity of Neisseria meningitidis PglL O-Oligosaccharyltransfemse with Diverse Synthetic Lipid Donors and a UDP-activated Sugar,” J. Biological Chemistry, vol. 288, no. 15, pp. 10578-10587, 2013.
[0633] [31] Sun et al., “Design and production of conjugate vaccines against S. Paratyphi A using an O-linked glycosylation system in vivo,” npj Vaccines, vol. 4, pp. 1-9, 2018.
[0634] [32] Pichichero, “Protein carriers of conjugate vaccines,” Human Vaccines & Immunotherapeutics, vol. 9, no. 12, pp. 2505-2523, 2013.
[0635] [33] Ge et al., “The C-Termainal Domain of AcrA is Essential for the Assembly and Function of the Multidrug Efflux Pump AcrAB-TolC,” J. Bacteriology, vol. 191, no. 13, pp. 4365-4371, 2009.
[0636] [34] Glaxosmithkline Biologicals SA WO/2017/067964 (Apr. 27, 2017).
[0637] [35] Avci et al., “A mechanism for glycoconjugate vaccine activation of the adaptive immune system and its implications for vaccine design,” Nature Medicine, vol. 17, no. 12, pp. 1602-1610, 2011.
[0638] [36] Dagan et al., “Glycoconjugate vaccines and immune interference: a review,” Vaccine, vol. 28, pp. 5513-5523, 2010.
[0639] [37] FORSGREN, Arne; European Pat. No. EP0594610 B1 (Sep. 2, 1998; related to WO 91/18926).
[0640] [38] Prymula et al., “Pneumococcal capsular polysaccharides conjugated to protein D for prevention of acute otitis media caused by both Streptococcus pneumoniae and non-typable Haemophilus influenzae: a randomised double-blind efficacy study,” The Lancet, vol. 367, pp. 740-748, 2006.
[0641] [39] Smithkline Beecham Biologicals S.A. WO/2000/056360 (Sep. 28, 2000).
[0642] [40] Uchida et al., “Mutation in the Structural Gene for Diphtheria Toxin carried by Temperate Phage β,” Nature: New Biology, vol. 233, pp. 8-11, 1971.
[0643] [41] Pappenheimer et al., “Diphtheria Toxin,” Ann. Rev. Biochem., vol. 46, pp. 69-94, 1977.
[0644] [42] Rappuoli, “Isolation and Characterization of Corynebacterium diphtheriae Nontandem Double Lysogens Hyperproducing CRM197,” Applied and Environmental Microbiology, vol. 46, no. 3, pp. 560-564, 1983.
[0645] [43] Neubauer & Helting, “Structure of Tetanus Toxin: the arrangement of papain digestion products within the heavy chain-light chain framework of extracellular toxin,” Biochiica et Biophysica Acta, vol. 668, pp. 141-148, 1981.
[0646] [44] Rubins et al., “Distinct roles for pneumolysin's cytotoxic and complement activities in the pathogenesis of pneumococcal pneumonia,” American Journal of Respiratory and Critical Care Medicine, vol. 153, no. 4, pp. 1339-1346, 1996.
[0647] [45] Walker et al., “Molecular cloning, characterization, and complete nucleotide sequence of the gene for pneumolysin, the sulfhydryl-activated toxin of Streptococcus pneumoniae,” Infect. Immun., vol. 55, no. 5, pp. 1184-1189, 1987.
[0648] [46] Mitchell et al., “Expression of the pneumolysin gene in Escherichia coli: rapid purification and biological properties,” Biochimica et Biophysica Acta, vol. 1007, no. 1, pp. 67-72, 1989.
[0649] [47] Mitchell et al., “Comparison of pneumolysin genes and proteins from Streptococcus pneumoniae types 1 and 2,” Nucleic Acids Research, vol. 18, no. 13, p. 4010, 1990.
[0650] [48] Glaxosmithkline Biologicals S.A. WO/2004/081515 (Sep. 23, 2004).
[0651] [49] Glaxosmithkline Biologicals S.A. WO/2006/032499 (Mar. 30, 2006).
[0652] [50] Paton, et al., WO 1990/006951 (Jun. 28, 1990).
[0653] [51] Berry et al., “Comparative virulence of Streptococcus pneumoniae strains with insertion-duplication, point, and
[0654] deletion mutations in the pneumolysin gene,” Infection and Immunity, vol. 67, no. 2, pp. 981-985, 1999.
[0655] [52] Patent WO 1999003884.
[0656] [53] Low et al., “Optimisation of Signal Peptide for Recombinant Protein Secretion in Bacterial Hosts,” Appl. Microbiol. Biotechnol., vol. 97, pp. 3811-3826, 2013.
[0657] [54] Yoon et al., “Secretory Production of Recombinant Proteins in Escherichia coli,” Recent Patents on Biotechnology, vol. 4, pp. 23-29, 2010.
[0658] [55] Tian et al., “Predicting Synonymous Codon Usage and Optimizing the Heterologous Gene for Expression in E. coli,” Sci. Reports, vol. 7, no. 9926, pp. 1-9, 2017.
[0659] [56] Chin et al., “Codon Optimization OnLine (COOL): a web-based multi-objective optimization platform for synthetic gene design,” Bioinformatics Applications Note, vol. 30, no. 15, pp. 2210-2212, 2014.
[0660] [57] Hilterbrand et al., “CBDB: The codon bias database,” BMC Bioinformatics, vol. 13, no. 62, pp. 1-7, 2012.
[0661] [58] Codon Usage Database, available at http://WorldWideWeb(www).kazusa.or.jp/codon/, KAZUSA DNA RES. INST.; last visited Jul. 30, 2018.
[0662] [59] Codon Optimization Tool, available at http://WorldWideWeb(www).idtdna.com/CodonOpt, INTEGRATED DNA TECHNOLOGIES; last visited Jul. 30, 2018.
[0663] [60] The Codon Bias Database, available at http://WorldWideWeb(www)cbdb.info (as described in Hilterbrand et al., 2012 BMC Bioinformatics 13:62, 7 total pages).
[0664] [61] Thermo Fisher Scientific, Protein Preparation Handbook, 2017.
[0665] [62] Thermo Fisher Scientific, Fusion Protein Purification Resins, 2013.
[0666] [63] Fisher et al., “Production of Secretory and Extracellular N-Linked Glycoproteins in Escherichia coli,” Applied and Environmental Microbiology, vol. 77, no. 3, pp. 871-881, 2011.
[0667] [64] Klein et al., “Design and Characterization of structured Protein Linkers with differing Flexibilities,” Protein Engineering, Design & Selection, vol. 27, no. 10, pp. 325-330, 2014.
[0668] [65] Rosano & Ceccarelli, “Recombinant Protein Expression in Escherichia coli: advances and challenges,” Frontiers in Microbiology, vol. 5, no. 172, pp. 1-17, 2014.
[0669] [66] ETH ZÜRICH WO/2003/074687 (Sep. 12, 2003).
[0670] [67] ETH ZÜRICH WO/2006/119987 (Nov. 16, 2006).
[0671] [68] Feldman et al., “Engineering N-linked protein glycosylation with diverse O antigen lipopolysaccharide structures in Escherichia coli,” PNAS, vol. 102, no. 8, pp. 3016-3021, 2005.
[0672] [69] Keys & Aebi, “Engineering Protein Glycosylation in Prokaryotes,” Current Opinion in Systems Biology, vol. 5, pp. 23-31, 2017.
[0673] [70] Sambrook & Russell, Molecular Cloning: A Laboratory Manual 3rd Edition, Cold Spring Harbor, N.Y.: CSHL Press, 2001.
[0674] [71] Jones Day, WO/2014/037585 (Mar. 13, 2014).
[0675] [72] Kowarik et al., “N-Linked Glycosylation of Folded Proteins by the Bacterial Oligosaccharyltransferase,” Science, vol. 314, no. 5802, pp. 1148-1150, 2006.
[0676] [73] Max-Planck-Gesellschaft zur Förderung der Wissenschaften, WO/2015/004041 (Jan. 15, 2015).
[0677] [74] Max-Planck-Gesellschaft zur Förderung der Wissenschaften E.V., WO/2016/091399 (Jun. 16, 2016).
[0678] [75] Max-Planck-Gesellschaft zur Förderung der Wissenschaften E.V., WO 2016198170 (Dec. 15, 2016).
[0679] [76] Wyeth L L C, US Pregrant Pub. No. 2007/0184072 (Aug. 9, 2007).
[0680] [77] University of Rochester, U.S. Pat. No. 4,673,574 (Jun. 16, 1987).
[0681] [78] Merck & Co. Inc., EP 0161188 B1 (Apr. 3, 1991).
[0682] [79] SCLAVO SPA, EP0208375 B1 (Dec. 11, 1991).
[0683] [80] American Cyanamid Co. EP0477508 (Jul. 12, 1995).
[0684] [81] U.S. Government as represented by the Secretary Of The Army, WO/1993/015760 (Aug. 19, 1993).
[0685] [82] Henry M. Jackson Foundation, WO/1995/008348 (Mar. 30, 1995).
[0686] [83] Lees, A., WO/1996/029094 (Sep. 26, 1996).
[0687] [84] Chu et al., “Further studies on the Immunogenicity of Haemophilus influenzae Type b and Pneumococcal Type 6A Polysaccharide-Protein Conjugates,” Infection and Immunity, vol. 40, no. 1, pp. 245-256, 1983.
[0688] [85] Leyva et al., “Rapid and sensitive anthrone-sulfuric acid assay in microplate format to quantify carbohydrate in biopharmaceutical products: method development and validation,” Biologicals, vol. 36, no. 2, pp. 134-141, 2008.
[0689] [86] Dische & Shettles, “A specific color reaction of methylpentoses and a spectrophotometric micromethod for their determination,” J. Biol. Chem., vol. 175, no. 2, pp. 595-603, 1948.
[0690] [87] Pogue et al., “Production of pharmaceutical-grade recombinant aprotinin and a monoclonal antibody product using plant-based transient expression systems,” Plant Biotech. J., vol. 8, pp. 638-654, 2010.
[0691] [88] Novartis A G, WO/2007/109812 (Sep. 27, 2007).
[0692] [89] Novartis A G, WO 2007/109813 (Sep. 27, 2007).
[0693] [90] Shirota & Kilnman, “Recent Progress Concerning CpG DNA and its use as a vaccine adjuvant,” Expert Rev. Vaccines, vol. 13, no. 2, pp. 299-312, 2014.
[0694] [91] The University of Iowa Research Foundation, WO/1996/002555 (Feb. 1, 1996).
[0695] [92] Cambridge Biotech Corp., U.S. Pat. No. 5,057,540 (Oct. 15, 1991).
[0696] [93] Stoute et al., “A Preliminary Evaluation of a Recombinant Circumsporozoite Protein Vaccine against Plasmodium falciparum malaria RTS, S Malaria Vaccine Evaluation Group,” N. Engl. J. Med., vol. 336, no. 2, pp. 86-91, 1997.
[0697] [94] Afiris A G, US Pre-grant Pub. No. 2015/0093431 (Apr. 2, 2015).
[0698] [95] Novartis A G, WO/2011/027222 (Mar. 10, 2011).
[0699] [96] Novartis A G, Patent US Pre-grant Pub No. 2012/0237546 (Sep. 9, 2012).
[0700] [97] Buonsanti et al., “Novel Adjuvant Alum-TLR7 Significantly Potentiates Immune Response to Glycoconjugate Vaccines,” Sci. Rep., vol. 6, p. 29063, 2016.
[0701] [98] Sabroe et al., “Toll-Like Receptors in Health and Disease: Complex Questions Remain,” J. Immunol., vol. 171, no. 4, pp. 1630-1635, 2003.
[0702] [99] Smithkline Beecham Biologicals S.A., Patent WO/1995/017210 (Jun. 29, 1995).
[0703] [100] Reilly, William J Jr, “Chapter 36: Pharmaceutical Excipients,” in Remington Essentials of Pharmaceutics, London, Pharmaceutical Press, 2012, pp. 683-704.
[0704] [101] Wacker et al., “N-linked glycosylation in Campylobacter jejuni and its functional transfer into E. coli,” Science, vol. 298, no. 5599, pp. 1790-1793, 2002.
[0705] [102] Shepherd et al., “Comparison of O-antigen gene clusters of Escherichia coli (Shigella) sonnei and Plesiomonas shigelloides O17: sonnei gained its current plasmid-borne O-antigen genes from P. shigelloides in a recent event,” Infect. Immun, vol. 68, no. 10, pp. 6065-6061, 2000.
[0706] [103] Hartley et al., “Biochemical Characterization of the O-Linked Glycosylation Pathway in Neisseria gonorrhoeae Reponsible for Biosynthesis of Protein Glycans Containing N,N′-Diacetylbacillosamine,” Biochemistry, vol. 50, no. 22, pp. 4936-4948, 2011.
[0707] [104] Anonsen et al., “Characterization of a Unique Tetrasaccharide and Distinct Glycoproteome in the O-Linked Protein Glycosylation System of Neisseria elongata subsp. glycolytica,” J. Bacteriology, vol. 198, no. 2, pp. 256-267, 2016.
[0708] [105] Endo and Koizumi, “Large-Scale Production of Oligosaccharides Using Engineered Bacteria” 2000 Curr. Op. in Structural Bio., vol. 10, pp. 536-541 (also in HANDBOOK OF CARBOHYDRATE ENGINEERING 1ST ED. 2005).
[0709] [106] Clausen et al., “Chapter 56: Glycosylation Engineering” in ESSENTIALS OF GLYCOBIOLOGY 3 Ed. 2017 (available at https://www.ncbi.nlm.nih.gov/books/NBK453027/).

The application's sequence listing, which the Patent Office published only in electronic form, follows.

SEQUENCE LISTING (217 sequences)

SEQ ID NO: 1 - protein, 613 aa, Pseudomonas sp.
AEEAFDLWNECAKACVLDLKDGVRSSRMSVDPAIADTNGQGVLHYSMVLEGGNDALKLAIDNALSITSDGLTIRLEGGVEPNKPVRYSYTRQARGSWSLNWLVPIGHEKPSNIKVFIHELNAGNQLSHMSPIYTIEMGDELLAKLARDATFFVRAHESNEMQPTLAISHAGVSVVMAQAQPRREKRWSEWASGKVLCLLDPLDGVYNYLAQQRCNLDDTWEGKIYRVLAGNPAKHDLDIKPTVISHRLHFPEGGSLAALTAHQACHLPLETFTRHRQPRGWEQLEQCGYPVQRLVALYLAARLSWNQVDQVIRNALASPGSGGDLGEAIREQPEQARLALTLAAAESERFVRQGTGNDEAGAASADVVSLTCPVAAGECAGPADSGDALLERNYPTGAEFLGDGGDVSFSTRGTQNWTVERLLQAHRQLEERGYVFVGYHGTFLEAAQSIVFGGVRARSQDLDAIWRGFYIAGDPALAYGYAQDQEPDARGRIRNGALLRVYVPRWSLPGFYRTGLTLAAPEAAGEVERLIGHPLPLRLDAITGPEEEGGRLETILGWPLAERTVVIPSAIPTDPRNVGGDLDPSSIPDKEQAISALPDYASQPGKPPREDLK

SEQ ID NO: 2 - protein, 638 aa, Pseudomonas sp.
MHLIPHWIPLVASLGLLAGGSFASAAEEAFDLWNECAKACVLDLKDGVRSSRMSVDPAIADTNGQGVLHYSMVLEGGNDALKLAIDNALSITSDGLTIRLEGGVEPNKPVRYSYTRQARGSWSLNWLVPIGHEKPSNIKVFIHELNAGNQLSHMSPIYTIEMGDELLAKLARDATFFVRAHESNEMQPTLAISHAGVSVVMAQAQPRREKRWSEWASGKVLCLLDPLDGVYNYLAQQRCNLDDTWEGKIYRVLAGNPAKHDLDIKPTVISHRLHFPEGGSLAALTAHQACHLPLETFTRHRQPRGWEQLEQCGYPVQRLVALYLAARLSWNQVDQVIRNALASPGSGGDLGEAIREQPEQARLALTLAAAESERFVRQGTGNDEAGAASADVVSLTCPVAAGECAGPADSGDALLERNYPTGAEFLGDGGDVSFSTRGTQNWTVERLLQAHRQLEERGYVFVGYHGTFLEAAQSIVFGGVRARSQDLDAIWRGFYIAGDPALAYGYAQDQEPDARGRIRNGALLRVYVPRWSLPGFYRTGLTLAAPEAAGEVERLIGHPLPLRLDAITGPEEEGGRLETILGWPLAERTVVIPSAIPTDPRNVGGDLDPSSIPDKEQAISALPDYASQPGKPPREDLK

SEQ ID NO: 3 - DNA, 1917 bp, Pseudomonas sp.
atgcacctgataccccattggatccccctggtcgccagcctcggcctgctcgccggcggctcgttcgcgtccgccgccgaggaagccttcgacctctggaacgaatgcgccaaggcctgcgtgctcgacctcaaggacggcgtgcgttccagccgcatgagcgtcgacccggccatcgccgacaccaacggccagggcgtgctgcactactccatggtcctggagggcggcaacgacgcgctcaagctggccatcgacaacgccctcagcatcaccagcgacggcctgaccatccgcctcgaaggcggcgtcgagccgaacaagccggtgcgctacagctacacgcgccaggcgcgcggcagttggtcgctgaactggctggtgccgatcggccacgagaagccttcgaacatcaaggtgttcatccacgaactgaacgccggtaaccagctcagccacatgtcgccgatctacaccatcgagatgggcgacgagttgctggcgaagctggcgcgcgatgccaccttcttcgtcagggcgcacgagagcaacgagatgcagccgacgctcgccatcagccatgccggggtcagcgtggtcatggcccaggcccagccgcgccgggaaaagcgctggagcgaatgggccagcggcaaggtgttgtgcctgctcgacccgctggacggggtctacaactacctcgcccagcagcgctgcaacctcgacgatacctgggaaggcaagatctaccgggtgctcgccggcaacccggcgaagcatgacctggacatcaagcccacggtcatcagtcatcgcctgcacttccccgagggcggcagcctggccgcgctgaccgcgcaccaggcttgccacctgccgctggagaccttcacccgtcatcgccagccgcgcggctgggaacaactggagcagtgcggctatccggtgcagcggctggtcgccctctacctggcggcgcgactgtcgtggaaccaggtcgaccaggtgatccgcaacgccctggccagccccggcagcggcggcgacctgggcgaagcgatccgcgagcagccggagcaggcccgtctggccctgaccctggccgccgccgagagcgagcgcttcgtccggcagggcaccggcaacgacgaggccggcgcggccagcgccgacgtggtgagcctgacctgcccggtcgccgccggtgaatgcgcgggcccggcggacagcggcgacgccctgctggagcgcaactatcccactggcgcggagttcctcggcgacggcggcgacgtcagcttcagcacccgcggcacgcagaactggacggtggagcggctgctccaggcgcaccgccaactggaggagcgcggctatgtattcgtcggctaccacggcaccttcctcgaagcggcgcaaagcatcgtcttcggcggggtgcgcgcgcgcagccaggacctcgacgcgatctggcgcggtttctatatcgccggcgatccggcgctggcctacggctacgcccaggaccaggaacccgacgcgcgcggccggatccgcaacggtgccctgctgcgggtctatgtgccgcgctcgagcctgccgggcttctaccgcaccggcctgaccctggccgcgccggaggcggcgggcgaggtcgaacggctgatcggccatccgctgccgctgcgcctggacgccatcaccggccccgaggaggaaggcgggcgcctggagaccattctcggctggccgctggccgagcgcaccgtggtgattccctcggcgatccccaccgacccgcgcaacgtcggcggcgacctcgacccgtccagcatccccgacaaggaacaggcgatcagcgccctgccggactacgccagccagcccggcaaaccgccgcgcgaggacctgaagtaa

SEQ ID NO: 4 - protein, 19 aa, Unknown
  source: /note="Description of Unknown: DsbA signal sequence"
MKKIWLALAGLVLAFSASA

SEQ ID NO: 5 - DNA, 57 bp, Unknown
  source: /note="Description of Unknown: DsbA signal peptide polynucleotide sequence"
atgaaaaagatttggctggcgctggctggtttagttttagcgtttagcgcatcggcg

SEQ ID NO: 6 - DNA, 10963 bp, Plesiomonas shigelloides
atgttctatgtgcactttataatggataagaaaatgaaattcgatactttgaatgcgaaaattgggattataggccttggttatgttggattgcctcttgctgttgagtttggaaagaaagtaacgacgattggatttgatattaataagtctcgtattgatgaattgcgaaatggtcacgatagtacattagagtgctcaaatttagagttgttagaagcaactaaattgacgtacgcctgttcattagatgcactaaaagagtgtaatgtatttattgtaactgttccaactccaattgataaacataaacagccagatctaacacctctaattaaagcatctgaaacattgggtaagataataaagaaaggcgatgttattatttatgagtcaacagtttaccctggagcgacagaagaagattgtataccagttgtagagaaagtatcaggtcttaagtttaatattgatttttttgccggttattcacctgagcgtattaatcctggggataaagagcatcgtgtaactaatatccttaaggtgaccagtggatctacaccggatgttgctgagtatgtagatcagctatataaattaataattactgtcggtacgcataaagcatcatcgataaaagtagcagaggctgcaaaagtaattgaaaacacgcagcgagatgtcaatattgcattgattaatgagttatctattatatttaataagttagggattgataccttagaggttcttgaggctgcaggtacgaagtggaattttttaccttttaggcccggtttagtaggtggccactgtataggtgtagatccttattatcttacacataaagcgcaaagtgtcggctatcatccagagatgattttagccggacgtcgtttaaatgatagtatggggcagtatgtcgtttcccagttagtcaaaaaaatgttgaaacaacggattcaagttgaaggggcgaatgtgttagtgatggggcttacatttaaagagaattgcccagatctacgaaacactaaagtgattgatattatttcagagttaaaagaatacaatatcaatatagatattatagatccatggtgttctaccgatgaggcacaacatgaatatggattaactttatgtgaagatcctaaagttaatcattatgatgcaataattatcgctgttgcacacaatgagtttcgcgagatgggagagagcgctattcgtgcattaggtaaagacgagcacgttttgttcgatttaaaatatgtgcttgataaaaaaagtatcgatatgcgcttgtaagagtgattaaaaaaatcaaatcctctttgatatgatacacctcagcattttatgctaggtttagcacttgattaatatacatggatatttatatgtctcgctatgaagagattacacagcagttaattttttcaccgaaaacttggttaattactggtgtcgctggctttataggatcaaatcttttagaaaagttacttaaattaaaccaggttgttattgggttagataacttttccacgggacatcaatataatcttgatgaagttaaaacattagtttccactgaacagtggagtcgattttgctttatagaaggtgatattcgagatctcactacctgtgagcaagttatgaaaggtgttgatcatgtcttacatcaggctgcgctaggttctgtacctcgttcaattgttgatcctataacaaccaatgcaactaatattactggatttttgaatatcttacatgcggctaaaaatgcacaagtacaaagttttacttatgctgcatcaagctcaacttatggagatcatcccgcactaccaaaagtagaggaaaacattggtaatccactttctccttatgcagttactaaatatgttaacgagatttatgctcaggtatatgctcgaacatatggttttaaaactattggattacgttattttaatgtatttggtcgtcgtcaagatcctaatggagcttatgctgcagtaattccaaaatggacagcagcaatgcttaaaggtgatgacgtatatattaatggcgatggtgaaacgagtcgtgatttttgttatatagataatgttatacaaatgaatatattatctgcattagcgaaggacagtgctaaagataatatatataatgttgcagttggtgatagaacaacgttaaatgaattatctggttacatttatgatgagcttaatttaattcaccatatcgataaattgagcattaagtatagagagtttagatctggagatgttaggcattctcaggctgatgttactaaggctatagatttactaaagtatagaccaaatataaaaatcagagagggattacgactttcaatgccgtggtatgtgagatttttaaaaggctaaattatattaacatgaataaataatctatttcacctctgttattaatgcaggggtgaaaatccatgtgtttattctaaatggtcagtgtatgtttagaaaaatgattgatgcaggtggtacatttttacttaaagcaatatttcaaataggagtttttgtttatttcgcacatgtgtcagatattactacatttggtattattagctatgtgtttactgtttattggtttgtgcttaacttctctgattatggatttagaacaaaattagtgaaagatatttctgataatagttattctgcatcagaattattatccagaagtgatggagttaaaacatatgtttttttcttcatttttataatcttcatgttttattcttatgtttctgattcaatttcattaactctgcttgtttatatttcatctgcatattttgtttgtatttcaagtggtagatttagcttgctacaggctgttggtcggtttagatgtgaattatatataaatatctactcaacaattatatatattgggtgtaatttatttttatctctgtttatcgaacctctatattatagtgcgatatcaatattcatatactcaatttcgcttttggttttctcatcacataaatgcaatgtgccatgttttcatataaaaagaccaagtcttttagtttataaagattttttggatgcaactccgttcgctattctggtgttactaaatgttgttttatctagtattgacctttttatattaaaagaatatttctcttataatagtgttgctatatatcaggtggtaactagggttaataccggtctaatgatagtgtttaatgttatttatactgttttattgccttcattttcttattatctgaaaaattctgaatggggtaatataaggaaattacaacgatatatatcactgttagtcttattactatgtttatgctattatttttttggcatctatttcgtagggatattgtttggtgatgagtataaggtaatatcttctgcaacatttttgataatgtttatggctcttattaaatataatttttggctaataaatgaactttatcttgtgtgtagtggaaatcaaagcgagcgagttaaatcgtattgtattggtgtggtcatttcaatagcggttttcttttattttatacctcggtatggatggagtggggcggtttttggaagtgccattgcaacattagtaattggaatattttatattatttctgtgaaaaaagattgtgggaaaattcttcatgataagtattcactaatgatgatctttgtcccaattttcttttattttattattaatggtcagtagcggttgttatattaatctgttgttgttttatatcgttccattaatatgtttagactcgattggaagtctaataaaggttaagtatgttaatatacctatatcctgtacttttgttatttaatatccttccggtttttttttatggacaaatgaactctgatttagagcgtttttttggagttcctattggctatatttcagatctaatattttatttctttgttgctttaacatctataataacgttgaggtttcacgtttctctgtggacaaagaaattattatttttaggcatcatattcctgatttatatcagcattcagatgttgttgttatcagcggatatctcaggtgtcgtaattttattatcgtttttttctaattttatagctttggttcttttggtatcattttgcattggtaaagatgagctttatttaactcattcggttagaaatataaatgttgtaatgtgttttggtattatctgtggagttgtaaaattatttattggttattctgaagatagtaattttatagtttatttaaatagaaatgccaccgcaattatagtagtgtgcttttattgtgtatattcatacttttatcgtggtcgaaagtcttggtatgtatcatctgtattgtactctctgttctttctttttctagatagccgagcaggaataatatcatttgctatatcgttgttttttgtttttcttcagttaacaaagaaggaaaagttattaatatcattgttttttgttcctcttctaactttaggtatttcttttactgatataggcactcgtcttgaacgaatgctgtcttcgtcacaggttatattctctggtggtaacactcttacaaaaagtcagaatgattatcgtcgagttgagttagtatttattggggttgatgttttaaaagaaaattatttaattggcactggattaggtgttgcaaattatgtaaaggctatagataaaaagtttttaggaagtaccaactttgggttggcgcataatttttatttatcttattcggctcagttagggattattggttttattttgcttatttctgtattttatataatgctgtctccaatttttaaatgcggagggtatattggtaaagggtgcgtttttgctttggctttctatgtcttttttaatgagtatatattgacgccagcgatatatatttatatttctatttttttatcggtggtttttatacgtaattctaggatgagaatatgttgttagaatatgttgaaagaaaaatttccttagccttgagtaagtatcctaaggtaagggatgttattaagttcttttatttatatatcgcatcattattcggaattattttgaataaaaataagacggttattcaatcaaaaatatacgagatttcaattgatgattctgaagaatcattttttggctattatgaccatagtccaatgagctctaatgggcggtacgtattgttccactctagtgcgtttagcactaaacgacacccaaagaaagttaagtatatatctatttgcgtaaaagaccttcttaataacaaagtttataagctatatgatacgcgagcatttaattggcagcagggaagccgattaatgtggattgatgatgacaatataatttttaatgactatgaaaataatggatacattagtgttgtctattctttgtctttgatgaaggttataaaaaaaataaactatccgatttatgatgtgaataattacaaggctgtgacgttagatttctcatggctggctaaatatgatagcgattatggttattataataagaaatcattttctacagatatttcaatcattaatttgaacacgggcggaatagaattatttttatccttagacgaaatgctaaagagaactaattttaaatgtaatattgatgttgaacatgtggtcaatcattttatgtttgctcccgatggacgttccgttatgttcatacatcgatactatacacctaaaggaaagcgtgaaaggttaatacattggaatttaataaatgataatgttcgagtcctaataaatgaatcgattattagtcattgttgttggaatgggaatgatgaaattataggtttttttggtgcagaaatagattcgcttaattattatagattgtcaattgaatcctgtaatacagagaaattgttttttgatgcaagaaaatattctgatggacatcctactatagttcataatagatatattatatctgatacttacccagataaaaatagaattaaaaagttgtttgtttatgaccttgtcaaaaatgattatcgcgagcttggattgttttatgagtcaatgagttttttttcttattctcgatgtgacttacatccaaggatctcggttgataatagatttttgtttgttgattcagttcactcagggaaaagaaaactatattttatgaggagtggtatttgtgagtgatgttctagtatctttaattatagtttgctttaatgcagagaagtatattgaaaaatctcttttggcatttattaatcaagatgttggattagataaatttgaattgattattgtagatggggattcatctgataatacaatatctattgttcaggatgttttttctaaacatagtaacattaagcataaaattatcaataataaaaaaagaactcttgctacgggttggaatattggggtgctagaagctaatggtaagtttgtgtgtagagttgatgcacatagtgatattccaaataactatatatctaaattattagatgattattttaatattatgcagtttgatgatagcgttgttggtgttggaggtgtattaactaattcttataaaactaagtttggttcaattgtagcggatttttatgcatctaaatttggtgttggtaattctccatttaggtgcgtagacaaaaataatcgactaaaaaaaacagatacggctgtctttgctttatataataaagatgtgttttttgatgttggactttttaatgaagtattagatagaaatcaagatattgattttcataagagagttttaagcaataatttttcattatatacagataatagtttatttgttgagtattatgttagagataattttaaagatttcataaagaaaggttttcttgatggtttttgggttgttatgtctggagcatattattttagacatatcgtgccacttttttttgttttgtatttaattgtatctttttctcttttctttgctactggtgattatatatatttatctttcttattttcttattttcttatttctattttgttttcaattcgagatgggcgaagttttataggtaaagtatttcttccttttatatttttgtcttatcatatttcttatggatgtggatcgttattatcttttttgaaaaggtattttaaatgaaaaattttattccttttgcgttacctgaaattggcgaagaagaaattgcagaggtaattgactctttacgttcaggttggattacgacaggtcctaaggctaagcaatttgaacaagaattttctaattacctaggagcgaacgttcaatcattagctgttaactctgctacgtcgggcttacatttggctcttgaagctgttggcgtaaaacctggagaccaagttattgtcccatcatatacattcactgctactgccgaaattgtcaggtaccttggtgctgatcctgtaattgttgatgtagatcgtaaaacatttaatatatcagttgatgccattgagaaggctattactaataaaacaaaggcgattattccagtacacttcgctggattagcttgtgacatggattcaatcttatcaattgctaaaaaatatgacctaaaggttgtcgaggatgccgctcatgcatttcctacaacatataaaggaagtaagataggaacgcttgattcagatgctacggtttttagcttctacgccaataaaactatgacaaccggtgaaggcggaatggttgtttcaaaaaataaagatataattgagcgttgtaaggtaatgcgtttacatggaatcagtcgtgacgcttttgaccggtaccagtctaaaactccttcttggttttatgaggttgtagctccagggtttaaatacaatatgcctgatatctgtgcggcaatcggtattcatcaacttagaaagatcgatgattttcagaaaaaacgtcaacgaatggcaaaaatttacgatgatgcgttaaaagaattgccacttgaattgcctgaatggcctactaatgctagtgatattcatgcttggcatctatatcctatccgcttaaaaactgattcggctattaatcgcgatgattttattaagaagttatcagatcttggaattggttgttctgtccattttataccgttgcataagcaaccggtttggcgtgatacatataatttgaacgccagtgactttccagtttctgaggagtgttatttaaatgaaatatctattcctctttatactaaaatgacggatcaagatcagttgttcgttatcgaatcgattagacaattatttatgtaatggtattttatattaaatgaaacgtatttttgatgttatcgtggcaggcttaggcctgctttttctatttcctgtttttatcattgtgtcaatgttaattgttgctgattctaaagggagtgttttttttaggcagtatagagttgggagatttgggaaagattttaggatacataaatttagaacgatgtttatcgattcagaaaaaaaaggacggataacagttggtcaagatgctcgggtaaccagagttggatggtatttacggaagtacaaaatcgatgagctgcctcaattgatagatgttctttctggaacaatgagtttggttggcccaagaccggaagtgagggagtttattgatgagtatcctgatgatataagggaaaaagttttatcggttaggccagggataactgacttagcatctatagaaatggtagatgaaaatgagattttgtctagttatgatgacccacgtagggcttatatagatataattcttccaatcaagcaaagatattatttggattatgttgctaacaattcagtaaagtatgattgtgtgataatttggaaaactattattaagattttgtcgcgataataaggtagtgtaggatgattgatagaatattggagctgccaagaattgttaagagaggtatcatcatctgcattgatgtagttatggtgatattctcattttggttgtcttattggttgaggcttgatgagcaaacggcttttcttagtgcaccgatgtggtttgctgcagctattcttaccatatttaccgtgtttatatttatcaggattgggctttatcgggcagtcttacggtatgttagtgcaaagataatgttgctaatatcagttggtattctggcctcaacgttatctcttgtcgttatatcatattcgctatccataatgttgccgcgcactgttgtcggaatttattttttggttttacttttactgacatcaggctctagattgctttttagaatgatacttaactatggagttaagggtagtgcgcctgttttgatttatggcgctggtgaatctggccgacaattattgccagcattaatgcaggcaaaagaatattttcctgtggcatttgtggatgataatcctcgcttgcataaggccgtcattcatggtgtaacagtttatccctcggataaactgagttacctagtagatcgctatggtataaagaaaattcttttggcgatgccgagcgtcagtaagtcacaaaggcagaaagtgattactcgtttagagcatttaccgtgtgaagttctctctattccgggcatggtcgatttagtcgaaggtcgagcacaaatcagtaatctcaaaaaagtatcgattgatgacttgctaggccgtgatccagttgctcctgatgccaaattgatggcggagaacattacaggcaaagcagttatggtcactggggcgggaggatcgatcggctctgagctttgtcgtcaaattgttcgatataagccagccaaattggttctatttgaactgtctgaatatgccctgtatgccattgagaaagagctatcgacgctgtgtgataaagaaggtttggatgtctcagtgatccctctgttgggctcggtgcagcgtcagaatcgcttacagatggtgatgaagtcctttggtattcaaacggtttatcatgcggctgcttataaacatgtgcctctggttgagcataatgtggtggaaggggtgcgtaataatgtgtttggtaccttgtactgcgctgagtcggcgatcgatagtggcgttgaaacctttgtgttgatttccaccgataaagcggtgcggccgaccaacactatggggacaaccaagcgcctggctgagttggtattgcaggcgttgtctgcacggcaaagcaaaacccgtttttgtatggtgcgatttggtaatgtgctgggatcctcgggctcagttgtaccattgtttgaaaagcagattgcccaaggtgggccagttaccctgactcatcgtgacattattcgctattttatgacaattcctgaagcatcgcagttggtgattcaagcgggggcgatggggcatggcggcgatgtctttgtcttagacatgggcgatccggttaagatttatgacttagccaaacgcatgatccggttaagtggcttgactgtgcgggatgataaaaatccagatggcgatattgccattgaagttacgggattacgtccaggtgagaaactgtatgaagaattactgattggtgattcagttcaaggtacctctcatccacgaattatgacggccaacgaagtgatgctaccgtggcaggatctatcgctcttacttaaagagctggatcaagcctgtcatgactttgatcatgagcgcattcgcagcttattgttacaagcaccagcggcattcaatccaactgatgatatttgcgatctagtttggcagcagaaaaaatcgctgttatcacaagcgagcaatgtcatacgcctgtga

SEQ ID NO: 7 - protein, 22 aa, Unknown
  source: /note="Description of Unknown: PelB signal sequence "
MKYLLPTAAAGLLLLAAQPAMA

SEQ ID NO: 8 - DNA, 1815 bp, Neisseria meningitidis
atgcccgctgaaacgaccgtatccggcgcgcaccccgccgccaaactgccgatttacatcctgccctgcttcctttggataggcatcgtcccctttaccttcgcgctcaaactgaaaccgtcgcccgacttttaccacgatgccgccgccgcagccggcctgattgtcctgttgttcctcacggcaggaaaaaaactgtttgatgtcaaaatccccgccatcagcttccttctgtttgcaatggcggcgttttggtatcttcaggcacgcctgatgaacctgatttaccccggtatgaacgacatcgtctcttggattttcatcttgctcgccgtcagcgcgtgggcctgccggagcttggtcgcacacttcggacaagaacgcatcgtgaccctgtttgcctggtcgctgcttatcggctccctgcttcaatcctgcatcgtcgtcatccagtttgccggctgggaagacacccctctgtttcaaaacatcatcgtttacagcgggcaaggcgtaatcggacacatcgggcagcgcaacaacctcggacactacctcatgtggggcatactcgccgccgcctacctcaacggacaacgaaaaatccccgccgccctcggcgtaatctgcctgattatgcagaccgccgttttaggtttggtcaactcgcgcaccatcttgacctacatagccgccatcgccctcatccttcccttctggtatttccgttcggacaaatccaacaggcggacgatgctcggcatagccgcagccgtattccttaccgcgctgttccaattttccatgaacaccattctggaaacctttactggcatccgctacgaaactgccgtcgaacgcgtcgccaacggcggtttcacagacttgccgcgccaaatcgaatggaataaagcccttgccgccttccagtccgccccgatattcgggcacggctggaacagttttgcccaacaaaccttcctcatcaatgccgaacagcacaacatatacgacaacctcctcagcaacttgttcacccattcccacaacatcgtcctccaactccttgcagagatgggaatcagcggcacgcttctggttgccgcaaccctgctgacgggcattgccgggctgcttaaacgccccctgacccccgcatcgcttttcctaatctgcacgcttgccgtcagtatgtgccacagtatgctcgaatatcctttgtggtatgtctatttcctcatccctttcggactgatgctcttcctgtcccccgcagaggcttcagacggcatcgccttcaaaaaagccgccaatctcggcatactgaccgcctccgccgccatattcgcaggattgctgcacttggactggacatacacccggctggttaacgccttttcccccgccactgacgacagtgccaaaaccctcaaccggaaaatcaacgagttgcgctatatttccgcaaacagtccgatgctgtccttttatgccgacttctccctcgtaaacttcgccctgccggaataccccgaaacccagacttgggcggaagaagcaaccctcaaatcactaaaataccgcccccactccgccacctaccgcatcgccctctacctgatgcggcaaggcaaagttgcagaagcaaaacaatggatgcgggcgacacagtcctattacccctacctgatgccccgatacgccgacgaaatccgcaaactgcccgtatgggcgccgctgctacccgaactgctcaaagactgcaaagccttcgccgccgcgcccggtcatccggaagcaaaaccctgcaaatga

SEQ ID NO: 9 - protein, 604 aa, Neisseria meningitidis
MPAETTVSGAHPAAKLPIYILPCFLWIGIVPFTFALKLKPSPDFYHDAAAAAGLIVLLFLTAGKKLFDVKIPAISFLLFAMAAFWYLQARLMNLIYPGMNDIVSWIFILLAVSAWACRSLVAHFGQERIVTLFAWSLLIGSLLQSCIVVIQFAGWEDTPLFQNIIVYSGQGVIGHIGQRNNLGHYLMWGILAAAYLNGQRKIPAALGVICLIMQTAVLGLVNSRTILTYIAAIALILPFWYFRSDKSNRRTMLGIAAAVFLTALFQFSMNTILETFTGIRYETAVERVANGGFTDLPRQIEWNKALAAFQSAPIFGHGWNSFAQQTFLINAEQHNIYDNLLSNLFTHSHNIVLQLLAEMGISGTLLVAATLLTGIAGLLKRPLTPASLFLICTLAVSMCHSMLEYPLWYVYFLIPFGLMLFLSPAEASDGIAFKKAANLGILTASAAIFAGLLHLDWTYTRLVNAFSPATDDSAKTLNRKINELRYISANSPMLSFYADFSLVNFALPEYPETQTWAEEATLKSLKYRPHSATYRIALYLMRQGKVAEAKQWMRATQSYYPYLMPRYADEIRKLPVWAPLLPELLKDCKAFAAAPGHPEAKPCK

SEQ ID NO: 10 - DNA, 1815 bp, Neisseria gonorrhoeae
atgcccgctgaaacgaccgtatccggcgcgcaccccgccgccaaactgccgatttacatcctgccctgcttcctttggataggcatcgtcccctttaccttcgcgctcaaactgaaaccgtcgcccgacttttaccacgatgccgccgccgcagccggactgattgtcctgttgttcctcacggcaggaaaaaaactgtttgatgtcaaaatccccgccatcagcttccttctgtttgcaatggcggcgttttggtatcttcaggcacgcctgatgaacctgatttaccccggtatgaacgacatcgtctcttggattttcatcttgctcgccgtcagcgcgtgggcctgcaagagtttggtcgcacacttcggacaagaacgcatcgtgaccctgtttgcctggtcgctgcttatcggctccctgcttcaatcctgcatcgtcgtcatccagtttgccggctgggaagacacccccctgcttcaaaacatcatcgtttacagcgggcaaggcgtaatcggacacatcgggcagcgcaacaacctcggacactacctcatgtggggcatactcgccgccgcctacctcaacggacaacgaaaaatccccgccgccctcggcgcaatctgcctgattatgcagaccgccgttttaggtttggtcaattcgcgcaccatcttgacctacatagccgccatcgccctcatccttcccttctggtatttccgttcggacaaatccaacaggcggacgatgctcggcatagccgcagccgtattccttaccgcgctgttccaattttccatgaacaccattctggaaacctttactggcatccgctacgaaactgccgtcgaacgcgtcgccaacggcggtttcacagacttgccgcgccaaatcgaatggaataaagcccttgccgccttccagtccgccccgatattcgggcacggctggaacagttttgcccaacaaaccttcctcatcaatgccgaacagcacaacatatacgacaacctcctcagcaacttgttcacccattcccacaacatcgtcctccaactccttgcagagatgggaatcagcggcacgcttctggttgccgcaaccctgctgacgggcattgccgggctgctgaaacgccccctgacccctgcatcgcttttcctgatctgcacgcttgccgtcagtatgtgccacagtatgctcgaatatcctttgtggtatgtctatttcctcatccctttcggactgatgctcttcctgtcccccgcagaggcttcagacggcatcgccttcaaaaaagccgccaatctcggcatactgaccgcctccgccgccatattcgcaggattgttgcacttggactggacatacacccggctggttaacgccttttcccccgccactgacgacagtgccaaaaccctcaaccggaaaatcaacgagttgcgctatatttccgcaaacagtccgatgctgtccttttatgccgacttctccctcgtaaacttcgccctgccggaataccccgaaacccagacttgggcggaagaagcaaccctcaaatcactaaaataccgcccccactccgccacctaccgcatcgccctctacctgatgcggcaaggcaaagttgcagaagcaaaacaatggatgcgggcgacacagtcctattacccctacctgatgccccgatacgccgacgaaatccgcaaactgcccgtatgggcaccgctgctacccgaactgctcaaagactgcaaagccttcgccgccgcgcccggtcatccggaagcaaaaccctgcaaatga

SEQ ID NO: 11 - protein, 604 aa, Neisseria gonorrhoeae
MPAETTVSGAHPAAKLPIYILPCFLWIGIVPFTFALKLKPSPDFYHDAAAAAGLIVLLFLTAGKKLFDVKIPAISFLLFAMAAFWYLQARLMNLIYPGMNDIVSWIFILLAVSAWACKSLVAHFGQERIVTLFAWSLLIGSLLQSCIVVIQFAGWEDTPLLQNIIVYSGQGVIGHIGQRNNLGHYLMWGILAAAYLNGQRKIPAALGAICLIMQTAVLGLVNSRTILTYIAAIALILPFWYFRSDKSNRRTMLGIAAAVFLTALFQFSMNTILETFTGIRYETAVERVANGGFTDLPRQIEWNKALAAFQSAPIFGHGWNSFAQQTFLINAEQHNIYDNLLSNLFTHSHNIVLQLLAEMGISGTLLVAATLLTGIAGLLKRPLTPASLFLICTLAVSMCHSMLEYPLWYVYFLIPFGLMLFLSPAEASDGIAFKKAANLGILTASAAIFAGLLHLDWTYTRLVNAFSPATDDSAKTLNRKINELRYISANSPMLSFYADFSLVNFALPEYPETQTWAEEATLKSLKYRPHSATYRIALYLMRQGKVAEAKQWMRATQSYYPYLMPRYADEIRKLPVWAPLLPELLKDCKAFAAAPGHPEAKPCK

SEQ ID NO: 12 - DNA, 1815 bp, Neisseria lactamica
atgcccgctgaaacgaccgtatccggcgcgcgccccgccgccaaactgccgatttacatcctgccctgcttcctttggataggcatcgtcccctttaccttcgcactccgtctggaaccgtcgcccgacttttaccacgatgccgccgccgcagccggcctgattgtcctattgttcttcacggcaggaaaaaagctgtttgatgtcaaaatccccgccatcagcttccttctgtttgcaatggcggcgttttggtatcttcaggcacgcctgatgaacctgatctaccccggaatgaacgacatcgtctcttggattttcatcttgctcgccgtcggcgcgtgggcctgcaagagtttggtcgcacactacggacaagaacgcatcgttaccctgtttgcctggtccctgcttatcggctccctgcttcaatcctgtatcgtcgtcatccagtttgccggctgggaagacacccctctgtttcaaaacatcatcgtttacagcgggcaaggcgtaatcggacacatcggacagcgcaacaacctcggacactacctcatgtggggcatattcgccgccgcctacctcaacggacaacgaaaaatccccgccgctctcggcgcaatctgcctgattatgcagaccgccgttttaggtttggtcaattcgcgcaccatcttgacctacatagccgccatcgccctcatccttcccttctggtatttccgttcggacaaatccaacaggcggacgatgctcaacatagccgcagccgtattccttaccgcgctgttccaattttccatgaacaccattctggaaacctttaccggcatccgctatgaaaccgccgtcgaacgcgtcgccaacggcggtttcacagacctgccgcgccaaatcgaatggcgcaaagcccttgccgccttccagtccgccccgatattcgggcacggctggaacagttttgcccaacaaaccttcctcatcaatgccgaacagcacaacatacacgacaacctcctcagcaacttgttcacccattcccacaacatcgtcctccaactccttgcagagatggggatcagcggcacgcttctggttgccgcaaccctgctgacgggcattgccgggctgctgaaacgccctctgacccccgcatcgcttttcctgatctgcacgcttgccgtcagtatgtgccacagtatgctcgaatatcctttgtggtatgtctatttcctcatccccttcggactgatgctcttcctgtcccccgcagaggcttcagacggcatcgccttcaaaaaagccgccaatctcggcatactgaccgcctccgccgccatattcgcaggattgctgcacttggactggacatacacccggctggttcactcctttttccccgccactgacgacagcgccaaaaccatcaaccggaaaatcaacgagttgcgctatatttccgcaaacagcccgatgctgtccttttatgccgacttctccctcgtaaacttcgccctgccggaacacaccgaaacccagccttgggcggaagaagcaaccctcaaagcactaaaataccgcccctactccgccacctaccgcatcgccctctacctgatgcggcaaggcaaagttgcagaagcaaaacaatggatgcgggcgacacagtcctattacccctacctgatgccccgatacgccgacgaaatccgcaaactgcccgtatgggcgccgctgctgcccgaactgctcaaagactgcaaagccttcgccgccgcgcccgggcatccggaagcaaaaccctgcaaatga

SEQ ID NO: 13 - protein, 604 aa, Neisseria lactamica
MPAETTVSGARPAAKLPIYILPCFLWIGIVPFTFALRLEPSPDFYHDAAAAAGLIVLLFFTAGKKLFDVKIPAISFLLFAMAAFWYLQARLMNLIYPGMNDIVSWIFILLAVGAWACKSLVAHYGQERIVTLFAWSLLIGSLLQSCIVVIQFAGWEDTPLFQNIIVYSGQGVIGHIGQRNNLGHYLMWGIFAAAYLNGQRKIPAALGAICLIMQTAVLGLVNSRTILTYIAAIALILPFWYFRSDKSNRRTMLNIAAAVFLTALFQFSMNTILETFTGIRYETAVERVANGGFTDLPRQIEWRKALAAFQSAPIFGHGWNSFAQQTFLINAEQHNIHDNLLSNLFTHSHNIVLQLLAEMGISGTLLVAATLLTGIAGLLKRPLTPASLFLICTLAVSMCHSMLEYPLWYVYFLIPFGLMLFLSPAEASDGIAFKKAANLGILTASAAIFAGLLHLDWTYTRLVHSFFPATDDSAKTINRKINELRYISANSPMLSFYADFSLVNFALPEHTETQPWAEEATLKALKYRPYSATYRIALYLMRQGKVAEAKQWMRATQSYYPYLMPRYADEIRKLPVWAPLLPELLKDCKAFAAAPGHPEAKPCK

SEQ ID NO: 14 - DNA, 1935 bp, Neisseria lactamica
atgcccgctgaaacgaccgtatccggcatccgccccgccgccaaactgccgatttacatcctgccctgtttcctttggataggcatcgtcccctttaccttcgcactccgtctggaaccgtcgcccgacttttaccacgatgccgccgcagcagccggcctgattgtcctattgttcttcacggcaggaaaaaagctgtttgatgtcaaaatccccgccatcagcttccttctgtttgcaatggcggcgttttggtatcttcaggcacgcctgatgaacctgatctaccccggtatgaacgacatcgtctcttggattttcatcttgctcgccgtcggcgcgtgggcctgcaagagtttggtcgcacactacggacaagaacgcatcgttaccctgtttgcctggtcgctgcttatcggctccctgcttcaatcctgcatcgtcgtcatccagtttgccggctgggaagacacccccctgcttcaaaacctcatcgtttacagcgggcaaggcgtaatcggacacatcgggcagcgcaacaacctcggacactacctgatgtggggcatactcgccgccgcctacctcaacggacaacgaaaaatccccgccgccctcggcacaatctgcctgattatgcagaccgccgttttaggtttggtcaattcgcgcaccatcttgacctacatagccgccatcgccctcatccttcccttctggtatttccgttcggacaaatccaacaggcggacgatactcggcatagccgcagccgtattccttaccgcgctgttccaattttccatgaacaccattctggaaacctttaccggcatccgctacgaaaccgccgtcgaacgcgtcgccaacggcggtttcacagacctgccgcgccaaatcgaatggcgcaaagcccttgccgccttccagtccgccccgatattcgggcacggctggaacagttttgcccaacaaaccttcctcatcaatgccgaacagcacaacatacacgacaaccacctcagcaacttgttcacccattcccacaacatcgtcctccaactccttgcagagatgggaatcagcggcacgcttctggttgccgcaaccctgctgacgggcattgccgggctgctgaaacgccccctgacccccgcatcgcttttcctgatctgcacacttgccgtcagtatgtgccacagtatgctcgaatatcctttgtggtatgtctatttcctcatccccttcggactgatgctctttctgtcccccgcagaggcttcagacggcatcgccttcaaaaaagccgccaatctcggcatactgaccgcctccgccgccatattcgcaggattgctgcacttggactggacatacacccggctggttaactcctttttccccgccactgacgacagtgccaaaaaccctcaaccggaaaatcaacgaactgcgctatatttccgcaaacagtccgatgctgtccttttatgccgacttctccctcgtaaacttcgccctgccggaataccccgaaacccagacttgggcggaagaagcaaccctcaaagcactaaaataccgcccccactccgccacctaccgcatcgccctctacctgatgcggcaaggcaaagttgcagaagcaaaacaatggatgcgggcgacacagtcctattacccctacctgatgccccgatacgccgacgaaatccgcaaactgcccgtatgggcgccgctgctgcccgaactgctcaaagactgcaaagccttcgccgccgcgcccgggcatccggaagcaaaaccctgcaaatgacccgcgccggcggatgcggatgccgcccgaaatgtaaagctccctgcaagacattgcaaaaaacagcaaaccggcagggaaatacgctatcaaaaaacattgcagccgtgttaagatga

SEQ ID NO: 15 - protein, 644 aa, Neisseria lactamica
MPAETTVSGIRPAAKLPIYILPCFLWIGIVPFTFALRLEPSPDFYHDAAAAAGLIVLLFFTAGKKLFDVKIPAISFLLFAMAAFWYLQARLMNLIYPGMNDIVSWIFILLAVGAWACKSLVAHYGQERIVTLFAWSLLIGSLLQSCIVVIQFAGWEDTPLLQNLIVYSGQGVIGHIGQRNNLGHYLMWGILAAAYLNGQRKIPAALGTICLIMQTAVLGLVNSRTILTYIAAIALILPFWYFRSDKSNRRTILGIAAAVFLTALFQFSMNTILETFTGIRYETAVERVANGGFTDLPRQIEWRKALAAFQSAPIFGHGWNSFAQQTFLINAEQHNIHDNHLSNLFTHSHNIVLQLLAEMGISGTLLVAATLLTGIAGLLKRPLTPASLFLICTLAVSMCHSMLEYPLWYVYFLIPFGLMLFLSPAEASDGIAFKKAANLGILTASAAIFAGLLHLDWTYTRLVNSFFPATDDSAKNPQPENQRTALYFRKQSDAVLLCRLLPRKLRPAGIPRNPDLGGRSNPQSTKIPPPLRHLPHRPLPDAARQSCRSKTMDAGDTVLLPLPDAPIRRRNPQTARMGAAAARTAQRLQSLRRRARASGSKTLQMTRAGGCGCRPKCKAPCKTLQKTANRQGNTLSKNIAAVLR

SEQ ID NO: 16 - DNA, 1929 bp, Neisseria gonorrhoeae
atgtccgctgaaacgaccgtatccggcgcgcgccccgccgccaaactgccgatttacatcctgccctgcttcctttggataggcatcatcccctttaccttcgcactcaggctgaaaccgtcgcccgacttttaccacgatgccgccgccgcggccggcctgattgtcctgttgttcctcacggcaggaaaaaagctgtttgatgtcaaaatccccgccatcagcttcctcctgtttgcaatggcggcattttggtggcttcaggcacgcctgatgaacctgatttatcccggaatgaacgacatcgcctcttgggttttcatcttgctcgccgtcagcgcgtgggcctgcaagagtttggtcgcacactacggacaagaacacatcgttaccctgtttgcctggtcgctgcttatcggctccctgcttcaatcctgcatcgtcgtcatccagtttgccggctgggaaaacacccccctgcttcaaaacatcatcgttcacagagggcaaggcgtaatcggacacatcgggcagcgcaacaacctcggacactacctcatgtggggcatactcgcctccgcctacctcaacggacaacgaaaaatccccgcagccctcggcgcaatctgcctgattatgcagaccgccgttttaggtttggtcaattcgcgcaccatcttgacctacatagccgccatcgccctcatccttcccttctggtatttccgttcggacaaatccaacagacggacgatgctcggcatagccgcagccgtattccttaccgcgctgttccaattttccatgaacgccattctggaaacctttacaggcatccgctacgaaactgccgtcgaacgcgtcgccaacggcggtttcacagacttgccgcgccaaagcgaatggaataaagcccttgccgccttccagtccgccccgatattcgggcacggctggaacagttttgcccaacaaaccttcctgatcaatgccgaacagcacaccatacacgacaacttcctcagcaccttgttcacccattcccacaacatcatcctccaactccttgcagaaatggggatcagcggcacgcttctggttgccgcaaccctgctgacgggcattgccgggctgctgaaacgctccctgacccccgcatcacttttcctgctgtgcgcgcttgccgtcagtatgtgccacagtatgctcgaatatcctttgtggtatgtctatttcctcatccccttcggactgatgctctttctgtcccccgcagaggcttcagacggcatcgccttcaaaaaagccgccaatctcggcatactgaccgcctccgccgccatattcgcaggattgctgcacttggactggacatacacccggctggttaactccttttcccccgccgctgacgacagtgccaaaaccctcaaccggaaaatcaacgaactgcgctatatttccgcaaacagcccgatgctgtccttttatgccgacttctccctcgtaaacttcgccctgccggaataccccgaaacccagacttgggcggaagaagcaaccctcaaagcactaaaataccgcccctactccgccacctaccgcatcgccctctacttgatgcggcaaggcaaagttgcagaagcaaaacaatggatgcgggcaacacagtcctattacccctacctgatgccccgatacgccgacgaaatccgcaaactgcccgtatgggcaccgctgctgcccgaactgctcaaagactgcaaagccttcgccgccgctcccggccatccggaaacaaaaccctgcaaacgacccgcgtcggcggatgcggataccgcccgaaatgtaaagctccatgcaagacattgcaaaaaacagcaaaccggtagggaaatacgctatcaaaaaacattgcagccgtgttaa

SEQ ID NO: 17 - protein, 642 aa, Neisseria gonorrhoeae
MSAETTVSGARPAAKLPIYILPCFLWIGIIPFTFALRLKPSPDFYHDAAAAAGLIVLLFLTAGKKLFDVKIPAISFLLFAMAAFWWLQARLMNLIYPGMNDIASWVFILLAVSAWACKSLVAHYGQEHIVTLFAWSLLIGSLLQSCIVVIQFAGWENTPLLQNIIVHRGQGVIGHIGQRNNLGHYLMWGILASAYLNGQRKIPAALGAICLIMQTAVLGLVNSRTILTYIAAIALILPFWYFRSDKSNRRTMLGIAAAVFLTALFQFSMNAILETFTGIRYETAVERVANGGFTDLPRQSEWNKALAAFQSAPIFGHGWNSFAQQTFLINAEQHTIHDNFLSTLFTHSHNIILQLLAEMGISGTLLVAATLLTGIAGLLKRSLTPASLFLLCALAVSMCHSMLEYPLWYVYFLIPFGLMLFLSPAEASDGIAFKKAANLGILTASAAIFAGLLHLDWTYTRLVNSFSPAADDSAKTLNRKINELRYISANSPMLSFYADFSLVNFALPEYPETQTWAEEATLKALKYRPYSATYRIALYLMRQGKVAEAKQWMRATQSYYPYLMPRYADEIRKLPVWAPLLPELLKDCKAFAAAPGHPETKPCKRPASADADTARNVKLHARHCKKQQTGREIRYQKTLQPC

SEQ ID NO: 18 - DNA, 1809 bp, Neisseria cinerea
atgtccgttgaagcatccgctccgaatccagccggcaaactgccgatttatatattgctctgttttctctggatcaatatcgcccccttcctgtccacactcaggatagggccggcatccggcttctaccttgaagccgcctctgccgccggtctgaccgttctgctgtttttgactgcacggcaaaaactgtttagcacaaaaatcccgcccctcagctttctcctgcttgtaatggcagcattctggtggttgcaggcacggctgatgaatctgatttaccccggcatgaacgatatcgtttcctgggtgttcatcttgctcgccataagcgcatgggcgtgcagatgcctggctgcacgcttcggacaggaacgcatcgtaaccctgtttgcctggtcgctgttcatcggagcattgctccaatcctgcgttgccatcatgcagtttgccggctggtcagatatcccgctgcttcaaggcatcatcgcttatagcggaggaaccgtaaacggacagctcggacagcgcaaccatctcggacactacctcatgtgggggatactagccgccgcctacctccacagccaacgaaaaatcccggctccctacggtgtaatctgcctgacggtcatgactgccgttttaggcctggtcaattcacgcaccatcttaggctacatagccgccatatccttcatccttccctgctggtatttccattcaggcaaaccctccagacggatcatactcagcatggctgcggccatatccctcgccgcactattccaattctccatgaataccctcttggaaacctttacccacatccgctatgaaactgccgtcgaacgcatcggcaacagcagcttttcaggctcgttgcgccaaatcgaatggaacaaagccatcgcagcattccgatccgcgccgctgttcggacacggttggaatagttttgcgcaacaaaccttcctgctcaatgccgaacaacacaatctcagcaacaatatcctcaacgtcctattcacccattcgcacaacatcattctccaactccttgcagaaaccggaatcagcggtacacttttagtggccgcaacgctgatgaccggtattgccggactgctgaaacggcccggcacaccggcctcgcttttcctgctttgcacccttaccgtcagcatgtgccacagcatgctcgaatacccattatggtacgtatatttcctcattcctttcagcctgatgctctttctctccgaaccaggcacttcagacggcatatcctgtacggcagccgccaaccgtagcatacaggctgcctcccttatcctacttgcagggcttctgcacttaggctggacatacacccaactggttcgcttcagcaccatacgccagagcgacaatacgcaaaccgtccaaaagaaaatcgacggacttcgccatatctccgaaaacagccccatgctgtcctactatgccgatctgagcctcagcaaacgcgcctcaccgaccgatgccgacatccgtccttgggcagaaaaagcaaccctcaaatcactaacttaccgcccctactccaacacctaccaagttgccctctacctcatgcggcaggggaaaaatgaagatgcggaacaatggatgcgtgcaacacagtcctattacccctaccttatgcccttttacgccggaaaaatccgacaacactccgcactagcaccgctgctgcccgatttgctcaaagactgcaaaattttcgtcaacacgccgcaacaccagaaagcacaatcctgcgactga

SEQ ID NO: 19 - protein, 602 aa, Neisseria cinerea
MSVEASAPNPAGKLPIYILLCFLWINIAPFLSTLRIGPASGFYLEAASAAGLTVLLFLTARQKLFSTKIPPLSFLLLVMAAFWWLQARLMNLIYPGMNDIVSWVFILLAISAWACRCLAARFGQERIVTLFAWSLFIGALLQSCVAIMQFAGWSDIPLLQGIIAYSGGTVNGQLGQRNHLGHYLMWGILAAAYLHSQRKIPAPYGVICLTVMTAVLGLVNSRTILGYIAAISFILPCWYFHSGKPSRRIILSMAAAISLAALFQFSMNTLLETFTHIRYETAVERIGNSSFSGSLRQIEWNKAIAAFRSAPLFGHGWNSFAQQTFLLNAEQHNLSNNILNVLFTHSHNIILQLLAETGISGTLLVAATLMTGIAGLLKRPGTPASLFLLCTLTVSMCHSMLEYPLWYVYFLIPFSLMLFLSEPGTSDGISCTAAANRSIQAASLILLAGLLHLGWTYTQLVRFSTIRQSDNTQTVQKKIDGLRHISENSPMLSYYADLSLSKRASPTDADIRPWAEKATLKSLTYRPYSNTYQVALYLMRQGKNEDAEQWMRATQSYYPYLMPFYAGKIRQHSALAPLLPDLLKDCKIFVNTPQHQKAQSCD

SEQ ID NO: 20 - DNA, 1833 bp, Neisseria mucosa
atgacctaccacacactttcagacggcctggccgaatcttcagtaaaaaccttttggcctttatggctcagttttctttggatttgcgccatcccttttctttcactctaccgagtcggcccattgcccagcttttatctggaagccatttcactgagcggctcattggtactgacattgattagcgcacacaaaggcctgctgaatatccgccttcccgcactcagtatcggcttatttgctatggctgcattctggtcgctccaagcgcgcttcatgcattccacctaccccggtatgagtgacatcactgcctggacctttgtcattttggcactgggcgcatggtcggttcgcggctgggtaacggcctacggacaagaacgcgtcgtcagcatctttgcttggtctttattgataggggcaaccatacaggccgccatcgtctggctgcaatttaaaggctggtccaacgtagaatggttgaacggcatcattgcccgaagcaacggcaccgtaaacggccaactcggccagcgcaaccacttgggacattatttaatgtggggcattttggcggcatcctatttatggacggcacgcaaaatgtccaatgcagcaggttttctgttcgtattggctttgaccgcaaccctcggccttgtcaactcgcgcaccatcttaggctacatcgccgccctattcctgattacgccgttatggttttggcgtacccgtttccaacacaaacgcgcactgtgcatttttctcctgaccgccatcctggccgccgctttccaattcggtatgggcagcctgttggacttgtttggcaacgtcaaatacgaaaccgctgtcgaacgcgcaggcaccagcggttttgaaggttccatgcgccaaatcgaatggagcaaagcatggattgcctttcaatccgcaccttggttcggccacggctggaacagctttgcccagcaaaccttcctgatcaatgcccaacaacaatacttccccaacaacatcctcggcgtactgtttacccattcgcacaacatcgtcatgcagttattgtccgaaatgggcattgccggcaccttgcttgcaaccttaaccctgcttgcagccgtgtggcgactgttgggccgtaaccaagcaccggcctcgctgtttttactgactgccgcctccgtcagcctttgccacagcatgcttgaatatccactttggtatatctacttcctcaccgtattcagcctgattctgtcgctgacaccctcttatccgaaagatgtttcagacggccctttatctatccgaatcagacagtgggcaggcggtatagccgctttatcgattttaatcggcatggcaaacctcagctgggaatatcaaaatctgacccaatatagccgtgtagggaaaaccgatgatcagcaaacggttcaaaacaaaatcgacggcttgcaacgactttccaaagaaagccccatgcttgcctattacgccgatttgagcttgagtaaacgtgcagatccgaccgatgcctacatccgtccgtgggcggaagaagccgcactcaaagccctgacctaccgcccctactccagtgcctaccaagtcggcctttacctctaccggcaaggcaaaaaagaagaaggtgcgcaatggatgcaggccatgcaatattattacccttatatgatgtatttctacgccgacaaaatacgcagccacccggcattcgcccccttgctgcccaaacttttgtccgattgcaaagatttcatcaacgcaccgaaacaccaaaccgcccaatcatgcgacaaaccctga

SEQ ID NO: 21 - protein, 610 aa, Neisseria mucosa
MTYHTLSDGLAESSVKTFWPLWLSFLWICAIPFLSLYRVGPLPSFYLEAISLSGSLVLTLISAHKGLLNIRLPALSIGLFAMAAFWSLQARFMHSTYPGMSDITAWTFVILALGAWSVRGWVTAYGQERVVSIFAWSLLIGATIQAAIVWLQFKGWSNVEWLNGIIARSNGTVNGQLGQRNHLGHYLMWGILAASYLWTARKMSNAAGFLFVLALTATLGLVNSRTILGYIAALFLITPLWFWRTRFQHKRALCIFLLTAILAAAFQFGMGSLLDLFGNVKYETAVERAGTSGFEGSMRQIEWSKAWIAFQSAPWFGHGWNSFAQQTFLINAQQQYFPNNILGVLFTHSHNIVMQLLSEMGIAGTLLATLTLLAAVWRLLGRNQAPASLFLLTAASVSLCHSMLEYPLWYIYFLTVFSLILSLTPSYPKDVSDGPLSIRIRQWAGGIAALSILIGMANLSWEYQNLTQYSRVGKTDDQQTVQNKIDGLQRLSKESPMLAYYADLSLSKRADPTDAYIRPWAEEAALKALTYRPYSSAYQVGLYLYRQGKKEEGAQWMQAMQYYYPYMMYFYADKIRSHPAFAPLLPKLLSDCKDFINAPKHQTAQSCDKP

SEQ ID NO: 22 - DNA, 1833 bp, Neisseria flavescens
atgacctaccacacactttcagacggcctgactaaatcttcagtaaaaaccttttggcctttatggctcagttttctttggatctgcgccgtcccttttctctcactctaccgagtcggcccactgcccagcttttatttggaagccatctcactgagcggctcattggtactgacattgattagcgcacacaagggcctgctgaatatccgccttcctgcgctcagtatcggcttgtttgccatggccgcattttggtcgctccaagcgcgcctcatgcattccacctaccccggcatgagcgacatcactgcctggacatttgtcattttggcactgggcgcatggtcggtgcggggctgggtagcagcttacggacaggaacgtgtcgtcagcatctttgcttggtctttattgataggtgcaaccatacaggctgccatcgtctggttgcaatttaaaggctggtccaacgtagagtggttgaacggcatcattgcccgaagcagcgataccgtaaacggccaactcggccagcgcaatcatttgggacattatttaatgtggggtattttggcggcatcctatttatggacggcacgcaaaatgcccaatgcagcaggttttctgttcgtattggcattgactgcaaccctcggccttgtcaactctcgcaccatcttaggctacattgccaccttattcctgattacgccgttatggttttggcgtacccgtttccaacacaaacgcgcactgtgcattttccttctaaccgccatcctggccgccgctttccaattcggcatgggcagcctgttggatttgtttggcaacatcaaatacgaaaccgctgtcgaacgcgcaggcaccagcggttttgaaggctccatgcgccaaatcgaatggagcaaggcatggattgcctttcaatccgcaccttggttcggtcacggctggaacagctttgcccagcaaaccttcctgatcaatgcccaacaacaatacttccccaacaatattctcggcgtactgtttacccattcgcacaatatcgtcatacagttattgtccgaaatgggcattaccggcaccttgcttgcaaccttaaccctgcttgcagccgtatggcgactgttgggccgcaaccaaacgccggcatccctgtttttattgaccgccgccgccgtcagcctctgccacagcatgctcgaatatccgctttggtatatttatttcctcaccgtattcagcctgattctgtcgctgacaccttcttatccgaaagatgtttcagacggccctttatctactagaatcaggcagtgggcaggcggtatagccgctttatcgattttaatcggcatggcaaacctcagctgggaatatcaaaatctgacccaatatagccgtgtagggaaaaccgacgatccgcaaacagtccaaaacaaaatcaacggcttgcagcagctttccaaagaaagccccatgcttgcctattacgccgatttaagtttgagcaaacgtgctgacccgaccgatgcctacatccgcccgtgggcagaagaggccgcactcaaagccctgacctaccgcccctactccaacgcctatcaagtcggcctctacctctaccgacaaggcaaaaaagaagaaggtgcgcaatggatgcaggcaatgcaatattattacccctatatgatgtatttctacgccgacaaaatacgcagccacccggcattcgccccactgctgcccaaacttttgtctgattgcaaagatttcatcaatgcaccgaaacaccaaactgccaaatcatgtgataaaccctaa

SEQ ID NO: 23 - protein, 610 aa, Neisseria flavescens
MTYHTLSDGLTKSSVKTFWPLWLSFLWICAVPFLSLYRVGPLPSFYLEAISLSGSLVLTLISAHKGLLNIRLPALSIGLFAMAAFWSLQARLMHSTYPGMSDITAWTFVILALGAWSVRGWVAAYGQERVVSIFAWSLLIGATIQAAIVWLQFKGWSNVEWLNGIIARSSDTVNGQLGQRNHLGHYLMWGILAASYLWTARKMPNAAGFLFVLALTATLGLVNSRTILGYIATLFLITPLWFWRTRFQHKRALCIFLLTAILAAAFQFGMGSLLDLFGNIKYETAVERAGTSGFEGSMRQIEWSKAWIAFQSAPWFGHGWNSFAQQTFLINAQQQYFPNNILGVLFTHSHNIVIQLLSEMGITGTLLATLTLLAAVWRLLGRNQTPASLFLLTAAAVSLCHSMLEYPLWYIYFLTVFSLILSLTPSYPKDVSDGPLSTRIRQWAGGIAALSILIGMANLSWEYQNLTQYSRVGKTDDPQTVQNKINGLQQLSKESPMLAYYADLSLSKRADPTDAYIRPWAEEAALKALTYRPYSNAYQVGLYLYRQGKKEEGAQWMQAMQYYYPYMMYFYADKIRSHPAFAPLLPKLLSDCKDFINAPKHQTAKSCDKP

SEQ ID NO: 24 - DNA, 1845 bp, Neisseria mucosa
atgatgtttgcccgtaccgcatatcatattaagaatgaatggaatgtccgcctgctgcctttatggatttgttttatctgggtttgcgccgtccctttcctgtcgatttaccgcgtaggcccgctgccgagcttctaccttgaagccgggtccctcttgggtgcgacaattttagttttggtttcggcatataaaggcctgctcaatatccgcctgccttatgtatctgtcggactgttgctgatggcggcatattgggcgatacagccacggacaatgggtttgctgtatccaggaatgagcgacttggcggcatggactttcgtcatcctcgccctatctgcctgggcctgccgcggctggatttccgcttacgggcaggaccgagttgttaccgtattcgcatggtcgttgttttttggtgcagctgcacaggctgtcgtggcgtttatgcagttcaaaggatggtcggacatttccctgtttcacggcatattggcttacggcggcggaacggtaaacggccagctcggacaacgcaaccatctgggccattatctgatgtggggcgtacttgccgcatcctatttgtgggcaacgcggaaaatgcccgactggctgggattggtttgcgtatttctgctgactgccgtcttgggtttggtcaactcgcgcactatcttgggctatatcatcgccatcgtattgattctgcctttttggtactggcgggcaggccgcgaatcggcacgcttaattaaaatcttctttttcgcagcggtattggctgcggttttccagttcggcatggggacattgcttgatttactgggcaacagccgttacgaaaccgccatagaacgcgccggtcatagcgattttgaaggttctgcgcgccaaatcgaatggcggaatgcttggaccgcctttacccgctccccaatcttcggacacggctggaacagcttcggcagcctgagttttctattaaatgcggaaaaacagtactttgccaataacatcctcggcgttttgttcacccactgccacaaccttatcctgcaaatccttgccgaaatggggctgacaggtgcattattgagcgcgggaaccatgctggctggcgtttggcgtttgattacccgtccgtccaatcctgccaacctgttcctactgaccgctgcaagcgtaaccatgtgccacagcatgctcgaatacccactttggtacatctacttcctaaccccgttcgccctcatgctttcgctctcaagcgcgcgttatgaagatgtatccgacggaatcaaacaagcccgccgccgcaatttgacaggcggtatcgccgcattggccattatcggcggcacgctgcacttaggctggaactacaccgacctgaccgcttacagccgtcaacccaaaaccgacgacccgtctcaagtcaacgccaaaatttccggactgcgccgcatttccgaaaccagccccatgctggcctattatgccgacctgagcctgacccgccgtgccgatccgtccgatgaaaaagtccaaccttgggcgcaaaaagcggcattcgacgcactcacctaccgcccttacagcaacgcctaccaagtcgggctttacctctaccgtcaaggtaaaaccaaagaaggcgcgcaatggatgcaagacatgtattattactatccttacacgatgccgttttacaccggcaaaatccgcagcagaaaggaattcgaaccgcttcttccccaaattttggaagactgccgcaatttcctgaaatcgccaaaacacaaaaccgccaaaccttgcgcggcggagataccgacatcgtaa

SEQ ID NO: 25 - protein, 614 aa, Neisseria mucosa
MMFARTAYHIKNEWNVRLLPLWICFIWVCAVPFLSIYRVGPLPSFYLEAGSLLGATILVLVSAYKGLLNIRLPYVSVGLLLMAAYWAIQPRTMGLLYPGMSDLAAWTFVILALSAWACRGWISAYGQDRVVTVFAWSLFFGAAAQAVVAFMQFKGWSDISLFHGILAYGGGTVNGQLGQRNHLGHYLMWGVLAASYLWATRKMPDWLGLVCVFLLTAVLGLVNSRTILGYIIAIVLILPFWYWRAGRESARLIKIFFFAAVLAAVFQFGMGTLLDLLGNSRYETAIERAGHSDFEGSARQIEWRNAWTAFTRSPIFGHGWNSFGSLSFLLNAEKQYFANNILGVLFTHCHNLILQILAEMGLTGALLSAGTMLAGVWRLITRPSNPANLFLLTAASVTMCHSMLEYPLWYIYFLTPFALMLSLSSARYEDVSDGIKQARRRNLTGGIAALAIIGGTLHLGWNYTDLTAYSRQPKTDDPSQVNAKISGLRRISETSPMLAYYADLSLTRRADPSDEKVQPWAQKAAFDALTYRPYSNAYQVGLYLYRQGKTKEGAQWMQDMYYYYPYTMPFYTGKIRSRKEFEPLLPQILEDCRNFLKSPKHKTAKPCAAEIPTS

SEQ ID NO: 26 - DNA, 1878 bp, Neisseria sp.
atggctgaccgccgcttgttttcagacggccacgaaaccgcctacagcccgtactccagacaaatacgccgcgacgaatggaacatgggccttgtaccgctgtggttcgggtttctgtgggtgtgcatcgccccgtttctctcgctctaccgcgtcggccccttatccagcttctatctggaagcaggttcgttgttgggcgcggtggtgctggtattggccacctccacttccggcctgctcaatgtacgcctgccgtcggcgagtattgcctttttcgtgctggcggctttctggtggctccaggccagaatgatgcacttaatgtaccccgggctgaacgatatggccgcatggactttcgtcatcctcgccctgactgcatgggcctgccgcggctgggttgccgaatacggacaggaacgtgtggccgcggtattcgcgtgggccttgctgttcggcgcactgatgcaggctgcggttgccttgatgcagttcaacggctgggcgggcatgaaaatctttcataacatcctcgcctacggcggccgcgaaagcattaacggccagctcggccagcgcaaccacttggggcattatctgatgtggggcgtattagccgcgtcgtacctgtggtcggtacgccgtatgcccgcatgggccggcgtattgtcgataacggcgctgtccgccgccttgggtttggtcaattcgcgcaccatcctgacctacgtcatcggcgtcggcctgctgctgccggtatggcgttggcgcgcaggaaaagaatccaaccgcacggtgctgattttcctgttcaccatcgccttggtcgccatcatccagttcggcatggggccgttactcgacaccttcggcaacggccattacgaaaccgccgtcgaacgcgtaggccgcagcagcttcgaaggttcggcgcgcgaaacggaatggggcaaggcatggatagcgtttaaaaacgcccccttgttcggccacggttggaacggctttgcgctgcaaagtttcctgattaacgccgaacaacacaacttcatcaacaacgtcatcagcgtactctttacccattcgcacaatatcgtcctccagcttctggccgaaaccggcttggtgggcacgctgcttaccgccggctgcctgattgccgcaatatggcgcatgacggtgcgcccgtaccatccggcctcgttgctgatgctgtcgctgatggccgtttccttgtgccacagcatgctcgaatacccgctttggtatatctatttcctgaccccgttcggcatcatggtttccctttcccccatccgccgtaaagacctttcagacggcctgaaccaagccaaactgcgtaattacgcaggcggcatcgccgctttgtacctgattgcgggcattctgcatctgggctgggtctatacggacctgaccgaatacagccgtcggccgaaaaccgacacgccggccgacaccgccctcaaaatagaaggcttgagacgcatcgccgacagccagcccatgttgcgttactacgcccaactgagcctgacccattacgccgatccgaccgatatcgttatccgtccgtgggcggagcaggcggcaatcgaagccctgaccttccggcctttcgccaacgcccaccaagtcggcctttaccgctaccgcaggggcgaaaccgagcaaggcgcgcaatggatgcagtcgatatactattactacccctacatgatgccgttttacgcaagcaaaatccgcagcaacggcttattcaagccgctgttgcctaaaatcctggccgactgcaaagccttcgtttccgcccctaaacacgaaacagccaaatcctgcgaagccccgaaatag

SEQ ID NO: 27 - protein, 625 aa, Neisseria sp.
MADRRLFSDGHETAYSPYSRQIRRDEWNMGLVPLWFGFLWVCIAPFLSLYRVGPLSSFYLEAGSLLGAVVLVLATSTSGLLNVRLPSASIAFFVLAAFWWLQARMMHLMYPGLNDMAAWTFVILALTAWACRGWVAEYGQERVAAVFAWALLFGALMQAAVALMQFNGWAGMKIFHNILAYGGRESINGQLGQRNHLGHYLMWGVLAASYLWSVRRMPAWAGVLSITALSAALGLVNSRTILTYVIGVGLLLPVWRWRAGKESNRTVLIFLFTIALVAIIQFGMGPLLDTFGNGHYETAVERVGRSSFEGSARETEWGKAWIAFKNAPLFGHGWNGFALQSFLINAEQHNFINNVISVLFTHSHNIVLQLLAETGLVGTLLTAGCLIAAIWRMTVRPYHPASLLMLSLMAVSLCHSMLEYPLWYIYFLTPFGIMVSLSPIRRKDLSDGLNQAKLRNYAGGIAALYLIAGILHLGWVYTDLTEYSRRPKTDTPADTALKIEGLRRIADSQPMLRYYAQLSLTHYADPTDIVIRPWAEQAAIEALTFRPFANAHQVGLYRYRRGETEQGAQWMQSIYYYYPYMMPFYASKIRSNGLFKPLLPKILADCKAFVSAPKHETAKSCEAPK

SEQ ID NO: 28 - DNA, 1818 bp, Neisseria arctica
atgtttaataatattttttcgagcaaccggagagttgatgattggccattgtggttctgcatcgcattaatttgtatcgctccgtttttatctttatatcgtgtagggccgctttcgagcttttaccttgagaacggctctttggctgcagctttgttgctggtgtttttaagtgctttttacggtgtattgaatgtacgtttgccggcaacagccgtctactttttggtattggccgcaggtttgtggttgcaagcaagactgatgggcttgatttaccccggcttcagtgacatgacggtatggacttttataattctggctttaactgcatgggcatgtcgtggctgggtggctgaattaggacaagatagggttgtggccgttttagcatgggcgttgctgataggtgcgttgttacaggctgcagtagcggtgatgcaatttacgggatgggctgcttggccgcctttgcgcggtattgtggcttatcgcggtttgcgcgaggtaagcggccagcttgggcagcggaaccatttggggcattacctgatgtggggcatattggcggcctcttatttgtggtcgcagcggcgtctgcctttatggggaggattgttatcagttgttgcattaaccgccgctttggctttggttaattcacgtactatttttacttatgtggctgccgtcggtttgctcttgcccttatggcggttgagggctgggcgagaagctaatcggacagtacttttgatgggcttggcgttggccttgacggtattcatgcagtatgcactgaatccggtgctggcatggttctcccacgttcaatacgatacggcgctttcgcgggttgagcgcagtacttttgctatgtcggcgcgcgatattgaatggcgtaaggcctggatagtatttcagacggcgccattatgggggcatggttggggaagtttgtcattgcaaggcttttcaaccaatatctttccaaaggtatatagtacgcatggtttgaatgttctatttacccactcacataatctgattttgcaattgttggcggaaaccgggattgttggtacgctggcagtagtgggaggctatttggcggctatttggagaatgttcaggcggcctgccggtcaggcatctttattgcttttggcattaatggcggtatcgttgtgtcatagtttgctcgaatacccgctttggtacatttactttctggtaccgtttgctttgatgatgagcttgtctcctgctgataagcaggatctgcgctatggtttgaggggaaccgtgcaaaattgggcaggggcagtggtggtgttgtttttagccgtaggtattgtgcgcctaacagcagtttatactgagttggccgaattcagccgccagaaaaatagtgatacacctgctgatattcttcaaaaaacaaacggcttgattaagatttccgccaccgaaccgatgttacgctactatgcccaaatgtccctggctaaaagggccgatcccgctgaccccatgccggctcagtgggcgcaagaggctgcaatgcaaacccaattgttcaggccttatgcgaatgcatatcagagaggcttttatctttaccggcaagggaaaacggcggaggcacaggaatggttgcgtaaaacttatgaatattaccccaatatgctgcccttttatcggaagaaaatttatgattcgccttattttgaaggtttgcgcgagcaagtcgattttcattgccgagcttatgaagaggtaaatccaaaagccaagtcgtgtttttcggcacaataa

SEQ ID NO: 29 - protein, 605 aa, Neisseria arctica
MFNNIFSSNRRVDDWPLWFCIALICIAPFLSLYRVGPLSSFYLENGSLAAALLLVFLSAFYGVLNVRLPATAVYFLVLAAGLWLQARLMGLIYPGFSDMTVWTFIILALTAWACRGWVAELGQDRVVAVLAWALLIGALLQAAVAVMQFTGWAAWPPLRGIVAYRGLREVSGQLGQRNHLGHYLMWGILAASYLWSQRRLPLWGGLLSVVALTAALALVNSRTIFTYVAAVGLLLPLWRLRAGREANRTVLLMGLALALTVFMQYALNPVLAWFSHVQYDTALSRVERSTFAMSARDIEWRKAWIVFQTAPLWGHGWGSLSLQGFSTNIFPKVYSTHGLNVLFTHSHNLILQLLAETGIVGTLAVVGGYLAAIWRMFRRPAGQASLLLLALMAVSLCHSLLEYPLWYIYFLVPFALMMSLSPADKQDLRYGLRGTVQNWAGAVVVLFLAVGIVRLTAVYTELAEFSRQKNSDTPADILQKTNGLIKISATEPMLRYYAQMSLAKRADPADPMPAQWAQEAAMQTQLFRPYANAYQRGFYLYRQGKTAEAQEWLRKTYEYYPNMLPFYRKKIYDSPYFEGLREQVDFHCRAYEEVNPKAKSCFSAQ

SEQ ID NO: 30 - DNA, 1797 bp, Neisseria shayeganii
atgtttaaaccgctgcggcagtctggggtgatgtggatgggcatgctgctgttggcggtggtgccgtttttgtcttcttggcgcacggggccccagggcggttggctgattgaaagcggctctttgctgtttgccatgctgtttgtgctgctgacggcggtgcagggcgggcggctgcgtttgccggcggtgtcgtggtattttctggcgctggccgtgttttgggcggtgcaggcgcgggtgttggcgctgccgtatgcggagatgtcggacctgacggcggcggtttggctgggtatggctttgctggcgtgggcctgccgcgttcaggtagcccgtttgggccaactgaaggcggcggatatttttgcctgggccttgttggcgggcgggttgctgcaggcgctggtgtgtgtgttgcagttcggcgagtggaccgcttggctgccggggctgatgaatgcgccggggcgttattttgtgttcggccagctcgggcagcgcaaccatttgggccattacatgatgtggggcgtgttggcggcggcctatttgtggagccgcaaacaactgccgaacggatgggcggcagggtgtgccttattgctgttgggtgtggtcgggctgattacgtcgcgcaccatgctgctgtatttggctgcgctggccgctctgttgcccgtgctgtattggcgcggcgggccggcattgaaacgttggtgcttgctgacgggcttgatgctgttgggcgtgctgttggcgcagtggctggtgatgccgctgctgtcggcgttgctggacagtggcggcagcataggcgaggcttccggtttgagccgcatggcaggcggcaatacggccagcccggggcgggcggcggaatgggcgaaggcgtggcaggtgtttttggcgcatcctgtattgggcgtgggctggcagggctattcgcatgagagttttgcctgggtgatgcgtgacggcagttttcgcgattacgaccccggcgtgctgttcacccacagccacaacagttttctgcaaattctggccgagatgggctgggtgggcggtttgttggtgttcggcggctggctcgcggtggtgtcgggctacctgaaacggcctgtcaacgaagcctcggcttggatgctgtgcttgatgacggtgtcgctgtgccacagtttgctggagtatccgctgtggtatgtgtattttctggctccgtttgcggtgatgatgagtttgacgccgatgaaagaggcatttgccggagcaaaccaaacatcggccgggcgttggctttggggtggcttggcagctttggtcgcggcgctgacgctgtattacggcgttgcctattaccgcttggcgcacgcctacggcaaaccgagcgccgactggccgcatgagcggcaactggcccaactcgagcgcatcgagcgctgggattactttctgcgctattacgcccacatgggtttgctgcgcaaagtggatattcagcgcaagccgctgccggcttgggggcgggaagctgcgctgcgggcctcccgattccgtccttatgccaacacggcggtgcgggcgttttatctggatcaggaaggccaagaacaggaagccgccgcctggctattgaatatgggccgctattaccccaccatgatgcaacgctatttggatgccgccaccacttacggtgtgtcagaagccgtggtcttgcccttgcggcaagcgtgctggcgttaccgcgaaaccgcccgcgctgcgctgaaatgcggtggagtaaatcagtaa

SEQ ID NO: 31 - protein, 598 aa, Neisseria shayeganii
MFKPLRQSGVMWMGMLLLAVVPFLSSWRTGPQGGWLIESGSLLFAMLFVLLTAVQGGRLRLPAVSWYFLALAVFWAVQARVLALPYAEMSDLTAAVWLGMALLAWACRVQVARLGQLKAADIFAWALLAGGLLQALVCVLQFGEWTAWLPGLMNAPGRYFVFGQLGQRNHLGHYMMWGVLAAAYLWSRKQLPNGWAAGCALLLLGVVGLITSRTMLLYLAALAALLPVLYWRGGPALKRWCLLTGLMLLGVLLAQWLVMPLLSALLDSGGSIGEASGLSRMAGGNTASPGRAAEWAKAWQVFLAHPVLGVGWQGYSHESFAWVMRDGSFRDYDPGVLFTHSHNSFLQILAEMGWVGGLLVFGGWLAVVSGYLKRPVNEASAWMLCLMTVSLCHSLLEYPLWYVYFLAPFAVMMSLTPMKEAFAGANQTSAGRWLWGGLAALVAALTLYYGVAYYRLAHAYGKPSADWPHERQLAQLERIERWDYFLRYYAHMGLLRKVDIQRKPLPAWGREAALRASRFRPYANTAVRAFYLDQEGQEQEAAAWLLNMGRYYPTMMQRYLDAATTYGVSEAVVLPLRQACWRYRETARAALKCGGVNQ

SEQ ID NO: 32 - DNA, 1752 bp, Neisseria shayeganii
atgatgcagcatttgtcttggccgcttcgaagttttctgttttgttttgcggccgcttatttttggggcgtgttgagcatacaacattatttgccatcactgggcttggatatgtatatcaaccagtatgtggcggctttgttaagcttgggcctctgtatattctttctcggtgaaaaaaacgatacatgccgatccatctccgctggagtgctgttgtggtttgctttgctgttctgtttgcttctgcagccgctgttgaatcagattatgtatcctgacggcttggtttttcccattgcgtcggtttttttatgcctgtttttagcctggggtgtacttaatttaaatgaaaccaccaagcagacgcttgtttattgggtggccatattattggtaacggttgggctattgacagctttgagtcaagttgcccagttgatgccgcaaaatccattgaccggcatcttgtttttccctatttcgggaaatcgcttaaccggaaatattgctcaagtgaatcaggctgcatttgttgaggccatgggaatttgtgcagcggtatatttatttttcaatgctaaagaaaagaaaatcatacatttcttttgtgcaatatctgtttttttcttggcaatgggcgttgcattatcagccagccggggagggatgattctagcaggggcggcggcagtcagctgcgcaattttttatgctgttccattgcgccgccgcttgagtttggctgtgctgtttattttgcttgcttctttggggtatgtattaggcgagttcatcttaaatcgctatctgcctggcggggtgactgctgttgggagatttggttcgggggaaggtttttttgttttaaggaaggcgctgctggaaaatgcttggcttgcttttcaagataactggcttctcggaatcggctggggaaatttcaatggcgttaatgcccaaaactttgaggaggtaagctggtttacttcctcgcatcatgctcacaattttattgcacagcttgcggctgagttaggtgtgtttgggttattaattattttgggatttttctgggtattgatccgtaattttaaatgtaaattgcctttatattgtgcattttcttattccgtcttatccattatatttttatattctcttagtgaatttcctttgtggtatttgcgctttctcatgttggctgctttttttattgcagttatagagaagccgcttacccctttaagtaagcactaccgctggctggggataagcatctcagcgctggtatttttgggaagtattttttatattcgccattatcaaaactatatcagtgttgcctatcaaatagaaatggcgcatgatgcagttgaagaaaatttggactcatacaagaagttgggaaaagtttttggctatggtgaatatgatgatttaatgatttatactattttgccggttagtgatgaaaatttagagcatcacatacagcttggcaagcgggttttgcacatgaattcaagccctgatttgttgataaaacaggcaaatctattggtcttggcgggaaaatccgaagaggctgataggctgtaccgggctgtttgcctttctgataatttacagaagagaaagtgtgtggaaatttttgccatgttacagcaggcagcgcatgatcatccggatatatttaccccgtattttgagcgatttaagctttggtatgacatttctttgcaagattga

SEQ ID NO: 33 - protein, 583 aa, Neisseria shayeganii
MMQHLSWPLRSFLFCFAAAYFWGVLSIQHYLPSLGLDMYINQYVAALLSLGLCIFFLGEKNDTCRSISAGVLLWFALLFCLLLQPLLNQIMYPDGLVFPIASVFLCLFLAWGVLNLNETTKQTLVYWVAILLVTVGLLTALSQVAQLMPQNPLTGILFFPISGNRLTGNIAQVNQAAFVEAMGICAAVYLFFNAKEKKIIHFFCAISVFFLAMGVALSASRGGMILAGAAAVSCAIFYAVPLRRRLSLAVLFILLASLGYVLGEFILNRYLPGGVTAVGRFGSGEGFFVLRKALLENAWLAFQDNWLLGIGWGNFNGVNAQNFEEVSWFTSSHHAHNFIAQLAAELGVFGLLIILGFFWVLIRNFKCKLPLYCAFSYSVLSIIFLYSLSEFPLWYLRFLMLAAFFIAVIEKPLTPLSKHYRWLGISISALVFLGSIFYIRHYQNYISVAYQIEMAHDAVEENLDSYKKLGKVFGYGEYDDLMIYTILPVSDENLEHHIQLGKRVLHMNSSPDLLIKQANLLVLAGKSEEADRLYRAVCLSDNLQKRKCVEIFAMLQQAAHDHPDIFTPYFERFKLWYDISLQD

SEQ ID NO: 34 - DNA, 1800 bp, Neisseria sp.
ttggattatgtggaaagccgtaaaaccgatacgactgtgttggtgttcggattggcgtttatctgtatcgtgccgtttatgtcaatctggcgaaccgggccgctctcgagcttttatctggaaagtgcgtcgttgctgcttgctttgttgtttgcattgggtagtgcgctttcgggaaaattaagtacgcagataccgcggggcggggtgtatttttttgctctggcagcttattgggcggtgcaggcaagggttatggagctgccttatccgggcatgagcgatatggcggcatggtcgtttgcggtcattgcgctgatgctttgggcatgcaggggctgggtgcaggaggtcgggcaggagcgggtggtcacggtgtttgcttcggtgttggttaccggagcgctgctgcaatcgctggtttgcattttgcagtttaccggttgggcttctcatttgaagggttatgtactgtacagcgatatcaacaatatcatggggcaattggcgcagcgcaatcatctggggcattatttaatgtggggtgtggttgcagcggcgtttctatggtcgcagaggcgggtgtctaattggttcggctgctttatgacagtatatctggcgctgattatgggcatggtgaattcgcgcagcctgtttgcttatgtggcggcgattgctttgttggcggtgttttggcggtggcgcagaggtaaggaaggcaatcatgcattgaaggtatttttgtttgccttgttgatggtggtggtggtacagctttcatttgataagctgatggcgctgatgggcattgattatttcagcgcgctcgacaggatgggcagcaaggattttgcgtcttccccgcgcgaagttgagtgggtgcgcgcgtggcatatttttctggcagcgccggtatgggggcacggctgggaatcgtattcgttgcaaagttttttaaccaatgtgtttcctaccggctggcgcaatgatgaaaccagtgtgctctatacgcattcgcacaatatcgttttgcagattttggcggatatggggctggtaggtgcgttattggtattcggcggtttgctttgggtggtgtggccttattttaaaaaaccggtaagtaatgagaattttctgccgctggctctgctttctgtatcgtttagccattcgttgctggaatatcccttgtggtacgtttattttttagtgccggtggggttgatgctgggcatgcaagatactaagcaaattgccgattcagacaggcctcaggttaaatggttgaattggggtgtggccgttttgtcgatatttattatcgtcggtatcgtgcgtttgggttttgtgtataccgagttggtaaaattcaataccatcgagaaaacggaaactgctgagcagacacaggaaaaaatcaacggtatgttgaaaattgccagaaccgaacccatgttacggtattatgcgcagctttctttgatgcgtcgcgcttcgcctagtgatgctgagctccagccgtgggcagttggcgctgctttggaagctatggtgttccgcccttatgccaatgcgcatgtggtgggtatgtatctctatcgaacgggccaccaagcggcaggccggaagtggatgcgcatgatgtatgagtattatccgatgcagatgccgttttacatttcccagatagacaaatcatcatatctggcagggctgcgtcaggaatgggagcagggttgtgcggagtatgcaaaaataaatccaaacgcaaagccttgtagaaatgagagataa

SEQ ID NO: 35 - protein, 599 aa, Neisseria sp.
MDYVESRKTDTTVLVFGLAFICIVPFMSIWRTGPLSSFYLESASLLLALLFALGSALSGKLSTQIPRGGVYFFALAAYWAVQARVMELPYPGMSDMAAWSFAVIALMLWACRGWVQEVGQERVVTVFASVLVTGALLQSLVCILQFTGWASHLKGYVLYSDINNIMGQLAQRNHLGHYLMWGVVAAAFLWSQRRVSNWFGCFMTVYLALIMGMVNSRSLFAYVAAIALLAVFWRWRRGKEGNHALKVFLFALLMVVVVQLSFDKLMALMGIDYFSALDRMGSKDFASSPREVEWVRAWHIFLAAPVWGHGWESYSLQSFLTNVFPTGWRNDETSVLYTHSHNIVLQILADMGLVGALLVFGGLLWVVWPYFKKPVSNENFLPLALLSVSFSHSLLEYPLWYVYFLVPVGLMLGMQDTKQIADSDRPQVKWLNWGVAVLSIFIIVGIVRLGFVYTELVKFNTIEKTETAEQTQEKINGMLKIARTEPMLRYYAQLSLMRRASPSDAELQPWAVGAALEAMVFRPYANAHVVGMYLYRTGHQAAGRKWMRMMYEYYPMQMPFYISQIDKSSYLAGLRQEWEQGCAEYAKINPNAKPCRNER

SEQ ID NO: 36 - DNA, 1800 bp, Neisseria wadsworthii
atgattttggattatgtggaaagccgtaaaaccgatacgactgtgctggtgttcggattggcgtttgtctgtatcgtgccgtttatgtcaatctggcgaaccggtccgctctcgagcttttatctggaaagtgcgtcattgctgcttgctttgctgtttgtgttgggtagtgcgctttcgggaaaattaagtgcgcggataccgcggggtggtgtgtacttttttgctctggcagtttattgggcggtgcaagcaagggttatggagctaccttacccgggaatgagcgatatggcggcgtggtcgtttgcgatcattgcgctgatgctttgggcatgcaggggctgggtacgggaagtcgggcagaagcgggtagtcacggtgtttgcatcagtgttggttactggagcgctgctgcaatcgttggtttgtattttgcagtttaccggttgggcttcccatttgaagggttatgtgctgtacagcgatatcaacaatatcatggggcagttggcgcagcgtaatcatctggggcattatttaatgtggggtgtgattgcggctgcgtttctatggtcgcagcgacgggtgtccaattggttcggctgctttatgacagtatatctggcgctgattatgggcatggtgaattcgcgcagcctgtttgcttatgtggcggcgattgctttactggcagtgttttggcgttggcgcaggggcaaggaaggtaatcatgcactgaaggtattcttgtttgccttgttgatggtggtggtggtgcagctttcttttgataagctgatggcgctgatgggcattgattattttagtgcgctagataggatgggcagcaaggattttgcgtcttccccgcgcgaagttgagtgggcgcgcgcgtggcatatttttctggcagcgccgatatgggggcatggctgggaatcgtattcgctgcaaagttttttaaccaatgtgtttcctaccggctggcgtaatgatgaaaccagcgtgctttatacgcattcacacaatatcgttttgcagattttggcggatatggggctggttggtgcgttattggtattcggcggtttgctttgggtggtgtggccttatttcaaaaaaccggtaagtaatgagaattttctgccgctggctctgctttccgtatcgttttgtcattcgttgttggaatatcccttgtggtacgtttattttttagtacctgtagggttgatgctgggaatgcaggatactgagcaaattgccgattcagacaggcctcagattaaatggttgaattggggtgtggccgttttgtcgatatttattatcgtcggtatcgtgcgtttgggttttgtgtataccgagttggtaaaattcaataccatcgagaaaacggaaactgctgaacaaaagcaggaaaaaatcaacggtatgttgaaaattgccagaaccgaacccatgttacgttattatgcccagctttctttgatgcgccgggcttcgcctgctgatgccgagcttcagccgtgggcggttggcgctgcgttggagacgatggtcttccgcccttatgccaatgcgcatgtggtgggtatgtatctttaccggacaggccatcaggcggcagggcgccggtggatgcgcatgatgtatgagtattacccgatgcagatgcctttttacatttcccagatagacaaatcatcatatctggcagggttacggcaggaatgggagcagggttgtgcggagtatgccaaaataaatccaaacgcaaagccttgtaagaaataa

SEQ ID NO: 37 - protein, 599 aa, Neisseria wadsworthii
MILDYVESRKTDTTVLVFGLAFVCIVPFMSIWRTGPLSSFYLESASLLLALLFVLGSALSGKLSARIPRGGVYFFALAVYWAVQARVMELPYPGMSDMAAWSFAIIALMLWACRGWVREVGQKRVVTVFASVLVTGALLQSLVCILQFTGWASHLKGYVLYSDINNIMGQLAQRNHLGHYLMWGVIAAAFLWSQRRVSNWFGCFMTVYLALIMGMVNSRSLFAYVAAIALLAVFWRWRRGKEGNHALKVFLFALLMVVVVQLSFDKLMALMGIDYFSALDRMGSKDFASSPREVEWARAWHIFLAAPIWGHGWESYSLQSFLTNVFPTGWRNDETSVLYTHSHNIVLQILADMGLVGALLVFGGLLWVVWPYFKKPVSNENFLPLALLSVSFCHSLLEYPLWYVYFLVPVGLMLGMQDTEQIADSDRPQIKWLNWGVAVLSIFIIVGIVRLGFVYTELVKFNTIEKTETAEQKQEKINGMLKIARTEPMLRYYAQLSLMRRASPADAELQPWAVGAALETMVFRPYANAHVVGMYLYRTGHQAAGRRWMRMMYEYYPMQMPFYISQIDKSSYLAGLRQEWEQGCAEYAKINPNAKPCKK

SEQ ID NO: 38 - DNA, 1815 bp, Neisseria elongata
atgcgtgatgatttttccctgaccaacaagggcggcgcgtgggcgtttgcctggctgttgtccgcctttttcctgattgcggcggtgccgtttttatcgattttgcgcgtcgggcctttgagcagtttttatttagaaagcggttcgctggtgttcgcgctgctgttggtgctgctgactttcgccacaggccgtctgaatgtattgccgccgcgcggaacggtgtatttcctcttgctggcggccttttggcatgtgcaggcgcgggtgatggggctggattatctaggcatgagcgatatggcggcctgggcgttcgtcgtgctgtcgctggcggcatgggcctgccggggctgggtgtcctcattggggcaggaacgggttaccgccgcactggcctgggttttgctgatcggtggctgcctgcaggcggcggtggcggtgatgcagtatgcgggttggacaagccatttcacgggttatttggccttgggggcgaaaaacaatattatcggccaactcggccagcgcaatcatttggggcattacctgatgtggggcctgctgtcggcggcgtggttgtggtcgcaacgccgcctgcacaccctactcggcgcgtcggcggtgctgttcctgtcgggcacgatggggctggtcaattcgcgcacgattttgctgtatgtggccgccgtcggcctgctggccttgttttggcggtggcggcaggggcgcgggggcaaccgcctgctattgattactttgtttgcgctgggcatggtggtggcggtgcagttttcgctgaacgccgtcttgggctggctgggcatcagccaggtggaaaccgccttgcagcggatggagggcagctctttcgccatgtccgcccgcgacctcgaatggcgcaacgcctggcgcgtgttccgagatgcgccgctgtgggggcacggctgggacagctatccccttcagggcttccttgccggcagtttccccaacggtttcagccccaacggcatcagcgtgttgtttacccattcgcacaacatcgttttgcagctgttggccgaaatggggctggtcggcacgctgctggtgttcggcggcgcgctgtgggtgatatggccgtatttcagacggcctgcttccgccgaaagcatgctgccgctcgcgctgatgaccgtcagcctgtgccacagcatgttggaatacccgctgtggtacatctatttcctaaccgcctttgccgtcatgatgagcatcacgccgtctgaaacccgcattcggacgggctacggcatcaaagccatgctgcctgccgcctccgccttcctcatcatctgcggcatcgtcaaactcggcttcgtttacaacgatttggtgaaattcgaccgccatgtgaaaaccgacaccgccgaagaagtcgtccgcaaagtttcgggattggaacgcatcgcgcgtaccgaaccgttactggcctactacgccgacctctcgctgacccgacgcggcacgcccttcgacccggaaatccgcccctgggcggccgaagcgtccaaacgcgccctgcggcaccgcccctacgccaccgcctatcaatacgccctctacgaataccgcgagggcaataccgaaaaagcggccgaatggctggaaaaactctatcactactacccttcttcgctgaactattacgcgaagcaaatccacgcctcgccgtattttaaaaacctctaccccgacctctaccgagcctgcgaggcctatcagaagctcaaaccgcgtaccgaaagctgcccgagacctgaagcgcagtag

SEQ ID NO: 39 - protein, 604 aa, Neisseria elongata
MRDDFSLTNKGGAWAFAWLLSAFFLIAAVPFLSILRVGPLSSFYLESGSLVFALLLVLLTFATGRLNVLPPRGTVYFLLLAAFWHVQARVMGLDYLGMSDMAAWAFVVLSLAAWACRGWVSSLGQERVTAALAWVLLIGGCLQAAVAVMQYAGWTSHFTGYLALGAKNNIIGQLGQRNHLGHYLMWGLLSAAWLWSQRRLHTLLGASAVLFLSGTMGLVNSRTILLYVAAVGLLALFWRWRQGRGGNRLLLITLFALGMVVAVQFSLNAVLGWLGISQVETALQRMEGSSFAMSARDLEWRNAWRVFRDAPLWGHGWDSYPLQGFLAGSFPNGFSPNGISVLFTHSHNIVLQLLAEMGLVGTLLVFGGALWVIWPYFRRPASAESMLPLALMTVSLCHSMLEYPLWYIYFLTAFAVMMSITPSETRIRTGYGIKAMLPAASAFLIICGIVKLGFVYNDLVKFDRHVKTDTAEEVVRKVSGLERIARTEPLLAYYADLSLTRRGTPFDPEIRPWAAEASKRALRHRPYATAYQYALYEYREGNTEKAAEWLEKLYHYYPSSLNYYAKQIHASPYFKNLYPDLYRACEAYQKLKPRTESCPRPEAQ

SEQ ID NO: 40 - DNA, 1806 bp, Neisseria bacilliformis
atgaacactgaatttccgggcgcaagccgcgcgggtttcgccctgctgctggccgcctttggcctgatttgcaccgtgcccttcctgtccatcctgcgcatcgggccgcagccgggcttctatctggaaagcggcgcgctgctgctcgcgctgctgtttgtgctgctcaccttcgccgcaggccgtctgaacgtactgccgccgcgcggcacggcttatttttgcgcgctcgcgctgttctggcatgtgcaggcgcgggtaatggggctggattatttcggcatgtccgatatggcggtgtggacgtttgccgtgctcgcgctgacgttgtgggcgtgccggggctgggtgctgtcgctggggcaggaaaaagttgccgacgcgctggcctgggcactgcttgtcggcggctgtttgcaggcggcggtggcggtgatgcagtatctgggctgggcggcgcacttcaccggctatctggccgccggtgcgaaaaacaacatcaccggccagctcggccagcgcaaccatctggggcattatctgatgtgggcgctggtggccgccgcctacctgtggggcggccgcaggctgcacactgccttcgccctgccgctggttttgtatctggcaggcacgctggggctggtcaactcgcgcaccatgttgctgtatgtggcggcggtggccgctttggcggtactgtggcggctgcggcagggcaaagcgggcaaccgcctgttcgccgccttcgccttctcgctggcggcggtggtggcggtgcagctctcgctcaacaccctgctcggctggctcggcggcgcgccggtggaaaccgccttgcagcgcgtcggcggcagctcgttcgccatgtccgcccgcgacctggaatggcgcgacgcctggcacgtgttcctcaccgcccccctgttcggccacggctgggacagcttctcgctgcaaggcttcctcgccgccgaatttccgcagggctacagccccaacggcatcagcgtcctcttcacccactcgcacaacatcgtcttgcagcttctggccgaaatgggcatcgtcggcacgctgttggtgttcggcggcttcctctggctggtcatcccctatttcagacggcctgccgatgccgaacgcatgttccccctcgccctgatggccgtcagcctgtgccacagcatgctcgaatacccgctgtggtacgtctatttcctcgtccccttcgccgtcatggtcggcattgcccccgcccctgccggccgccgcccctttcagacggcctggggcatacccgccctgctgcccgccgccgccgccctcgtcatcgccatcggagccgtcaaactcggcttcacctattacgagctcatccgattctcccgcatcgacaaaaacgacgactacatggccgtcagccgcaaaatcgacggcctgcgcgccatcgccgccaaagagccgctcttggcctactacgccgagctctccctcacccgccgcgcctcgcccgccgacaacgtcatcaaaccctgggcggagcaagccgcccgccgcgccctgcgccaccgcccctacgccaccgcctcgcaatacggcctctaccaataccgcaccggcgaccccgaacaggccgcccgctggatgcgccaactctaccgctactaccccacctcgatgccgtactacgtcggccaaatccaccgctcgccccacttcgcccccctctaccccgacctctaccgcgcctgcaacgaataccagaaactcaaaccccgcaccgaaagctgcccgaggccgtag

SEQ ID NO: 41 - protein, 601 aa, Neisseria bacilliformis
MNTEFPGASRAGFALLLAAFGLICTVPFLSILRIGPQPGFYLESGALLLALLFVLLTFAAGRLNVLPPRGTAYFCALALFWHVQARVMGLDYFGMSDMAVWTFAVLALTLWACRGWVLSLGQEKVADALAWALLVGGCLQAAVAVMQYLGWAAHFTGYLAAGAKNNITGQLGQRNHLGHYLMWALVAAAYLWGGRRLHTAFALPLVLYLAGTLGLVNSRTMLLYVAAVAALAVLWRLRQGKAGNRLFAAFAFSLAAVVAVQLSLNTLLGWLGGAPVETALQRVGGSSFAMSARDLEWRDAWHVFLTAPLFGHGWDSFSLQGFLAAEFPQGYSPNGISVLFTHSHNIVLQLLAEMGIVGTLLVFGGFLWLVIPYFRRPADAERMFPLALMAVSLCHSMLEYPLWYVYFLVPFAVMVGIAPAPAGRRPFQTAWGIPALLPAAAALVIAIGAVKLGFTYYELIRFSRIDKNDDYMAVSRKIDGLRAIAAKEPLLAYYAELSLTRRASPADNVIKPWAEQAARRALRHRPYATASQYGLYQYRTGDPEQAARWMRQLYRYYPTSMPYYVGQIHRSPHFAPLYPDLYRACNEYQKLKPRTESCPRP

SEQ ID NO: 42 - DNA, 1797 bp, Neisseria sp.
atgcgcgttgaacggcaaaacgatccgtggggcttcgcgctgcttttggcggcgttttccctgattgcggttgtgcctttcctgtcgatttggcgggtggggccgcagccgggtttttatttggaaagcggctcgctgctgtttgcgctgctgttggtgctgctgacctttgcttttggccgtctgaacgtgctgccgccgcgcggcacggtgttttttctggcgctggcgctgttttggcatgtgcacgcgcgggcggtgggcgcggattatttcgggctgtcggacttggcggtatggacgtttgtcgcgctgtcgctggcctcgtgggcgtgccgcggctgggtgctgtcgctggggcaggagagggcggtggcggcgctggcttgggcgctggccgtcggcggctgtttgcaggcggcggtggcgctgatgcagtatttgggctggacggcgcatttcacgggttatttggcgcggggttcggcgtcgaatatcacggggcagctcggccagcgcaaccatttgggacattatctgatgtgggggctgctgtcggtgtcgtacctgtgggcgcagcggcgtcttgcggcggttgtggcgttgccggcggtgttgtttctcacggggacgatgggcttggtgaattcgcgcaccatgctgctttatgtgctggcggcgggggcgctggcggcgctgtggcggctgcggcagggcagggcgggcaaccgtctgtttctgacgatgctgttttcgctggcgatgctggtggccgtgcagctgtcgctcaatacggtgctgggttggctgggcgcggggcaggtggaaacggccttgcagcgcgtggaaagcagctcgtttgccatgtcggcgcgcgatttggaatggcgcgatgcctggcgcgtgttcctttccgcgcccgtgtgggggcacggttgggacagcttttcattgcagggctttctggccgccgagtttcccgacggctacagccccaacggcatcagcgtgctgtttacccattcgcacaatatcgtcttgcaacttctggccgagatggggctggcgggcacgcttttggtgttcggcggcgcgttgtggacggtgtggccgtatttcaaacggcctgccgccgatgccgcgctgctgcctttggcgctgatggcggtgagcctgtgccacagcatgctggaatatccgctgtggtatgtctattttctgacgccgtttgccctgatgatgtcgctcgcgccgacccggcggccgccttttcagacggccttcggtctggttgccatgctgcccgccgctgccgcgctggtgatcgccgccggcatcgtcaaacttggtttcacttatgccgaccttgtgtatttcgacaaacgcggcaaagacgacagcccgatggaaacctaccgcaaaatcgacggcctgcgcgccatcgccgcgaaagagccgctcttggcctattacgccgaactctcgctcacccgccgcgcctcgccgtcggacaacgtggtcaaaccatgggcggaagccgccgccaaccgcgccctgcgccaccgcccctacgccaccgccgtccaatacggcctctaccaataccgcgcgggcaaccgctacaccgccgaacagtggctcaaccggctctaccgctactatccgacttcgatgaaacagtatgccgcgcaaatccaccgctcgcctcactttgccgcgctctatcccgacctctaccgcgcgtgcaacgaataccaaaagctcaaaccgcgcaccgaaagctgcccgcagccgtga

SEQ ID NO: 43 - protein, 598 aa, Neisseria sp.
MRVERQNDPWGFALLLAAFSLIAVVPFLSIWRVGPQPGFYLESGSLLFALLLVLLTFAFGRLNVLPPRGTVFFLALALFWHVHARAVGADYFGLSDLAVWTFVALSLASWACRGWVLSLGQERAVAALAWALAVGGCLQAAVALMQYLGWTAHFTGYLARGSASNITGQLGQRNHLGHYLMWGLLSVSYLWAQRRLAAVVALPAVLFLTGTMGLVNSRTMLLYVLAAGALAALWRLRQGRAGNRLFLTMLFSLAMLVAVQLSLNTVLGWLGAGQVETALQRVESSSFAMSARDLEWRDAWRVFLSAPVWGHGWDSFSLQGFLAAEFPDGYSPNGISVLFTHSHNIVLQLLAEMGLAGTLLVFGGALWTVWPYFKRPAADAALLPLALMAVSLCHSMLEYPLWYVYFLTPFALMMSLAPTRRPPFQTAFGLVAMLPAAAALVIAAGIVKLGFTYADLVYFDKRGKDDSPMETYRKIDGLRAIAAKEPLLAYYAELSLTRRASPSDNVVKPWAEAAANRALRHRPYATAVQYGLYQYRAGNRYTAEQWLNRLYRYYPTSMKQYAAQIHRSPHFAALYPDLYRACNEYQKLKPRTESCPQP

SEQ ID NO: 44 - DNA, 1827 bp, Neisseria sp.
atgtttaaccgtttttcagacggcacggctacggtatggtcgtggcggttgtggccggtgtggctgtgttttgcgtgtatctgcatcgcgccttttgtgtcgctgtaccgcgtagggccgctatccagcttttatcttgaagcaggttctttggccggtgctgttttattgttgttgttgactgcgttaacaggccgtctgaatgtgcgcctgcctgaggcttcggtttattttttggctttggccgctttttggtggcttcaggcgcggttgatgaatctgacttatccgggcatgagcgatttggcggtatcggcgtttgtgatcattgcgctggcggcttgggcttgccgcagctgggttgccgggttcgggcaggagcggatagtgtcggtgctggcgtggactttgctgttcggtgcgttgattcagtcggtagtggtggtgatgcagtttaccggctgggcatcggcggaaatgttccgcggcatcatatcctaccgcggtttgcgcgaagtgagcgggcaactcgggcagcgcaaccatttgggccattatctgatgtggggtacgctggctgcatcttacctgtgggcggcgcgcagaatgcccggttggctcggtttcgcattggtgctgctgttgacttctgcgctgggcttggtcaattcgcgcaccattctcacttatgtggcgggtgtgggtctgctgttgcccttgtggcgctggcgtagcggagcgggtagcaaccgcatggtcggcatcgtgctgtttgcgttggtgatgacgctgctggttcaattcggaatcggttacatcttagactgggtttccggcatgaaatacgataccgcagtcgaacgggcgggtagctccagtttcggcggttcggcacgcgatatcgaatggcgcaaggcttggacgatttttctttctgcacccgtgtggggctacggctggggcagctattcgctgcaaggttttctggtgcatgccgaagaaggtaagttcagcatgaacatcttaaacgtgctgtttacccattcgcacaacctgattttgcagctgctgtcggaaatgggtttggtcggcacggccttaaccgtattcggttttcttgcggcaatttggcggatgttcagacggcctccgagcaatgcttcgctgcttcttttggccatgatggctgtgtcgttatgccacagtatgttggaatatccgctttggtatatctattttttggtgccgtttgctttaatggccagtttgtcgcccgctgatgaacacgatgcttcagacggcctgaaaaccgccaaacggcagaacatcggcgcagcggtattggccgtgtgtttgctggcaggcattgcccgcttgggtttcgtttataccgaccttgcccgtttcgaccgtcagccgaaaggtgaaaccgttgaacagtccgcccaaaaaatcgaaggcttgagaaagattgccgaaaccgaaccgatgttgcgctattacgcccagctttcgttaacccgccgggttaacccttccgcacctaccgtgtatccgtgggcggaccaagcggcacgggaagccttaacctaccggccgtattccaatgcttatcaggtcggtttgtatcaataccgcgccggacaaacccggcagggcagcgcatggttggataaaatgtatctgtattacccgtatatgatgcagcattatctcgataaaatccgcagcaacggcacactcaaacccttagagccgcgcttgtggcaaacgtgtgaagcgttttatgagaaaaaatatccccagtccaaaccgtgtaaacgttag

SEQ ID NO: 45 - protein, 608 aa, Neisseria sp.
MFNRFSDGTATVWSWRLWPVWLCFACICIAPFVSLYRVGPLSSFYLEAGSLAGAVLLLLLTALTGRLNVRLPEASVYFLALAAFWWLQARLMNLTYPGMSDLAVSAFVIIALAAWACRSWVAGFGQERIVSVLAWTLLFGALIQSVVVVMQFTGWASAEMFRGIISYRGLREVSGQLGQRNHLGHYLMWGTLAASYLWAARRMPGWLGFALVLLLTSALGLVNSRTILTYVAGVGLLLPLWRWRSGAGSNRMVGIVLFALVMTLLVQFGIGYILDWVSGMKYDTAVERAGSSSFGGSARDIEWRKAWTIFLSAPVWGYGWGSYSLQGFLVHAEEGKFSMNILNVLFTHSHNLILQLLSEMGLVGTALTVFGFLAAIWRMFRRPPSNASLLLLAMMAVSLCHSMLEYPLWYIYFLVPFALMASLSPADEHDASDGLKTAKRQNIGAAVLAVCLLAGIARLGFVYTDLARFDRQPKGETVEQSAQKIEGLRKIAETEPMLRYYAQLSLTRRVNPSAPTVYPWADQAAREALTYRPYSNAYQVGLYQYRAGQTRQGSAWLDKMYLYYPYMMQHYLDKIRSNGTLKPLEPRLWQTCEAFYEKKYPQSKPCKR

SEQ ID NO: 46 - DNA, 1806 bp, Neisseria weaveri
atgtttgatgcccaaacttttcagcaccgtttattttccaaagcactcctgccgctctggttttgctttctttggatctgcgccctgccgtttctgatgatttaccgcgtcggccctctttccagtttttatatcgaggcggtttccctcagcggcatattgctgtttctgctgctttcctcgctgtcaggccgtctgaaaaaccgattgcctgccgcatttttctatttcatgctgttggccgcattttggtggattcaagcccgtgtcatggatttaacctatccgggtataagcgatatggcggcctggtcattcctgatcatcgctttgggcgcatgggcatgccgcagttggattgaagatttcggccacgaaaccgtagtttccgttttcgcttcggctttgcttatcggggcggtgttgcaggctgcggtcgcaattatgcagtttaccggttgggcttctgccgactttctacacggcattgtctcttacaaaggcttgcgcgaagtcaacggccaattgggacaaagaaaccatctcggtcattatctgatgtggggcatcatggccgccgcttatttgtggaatatccgccgccttccgactgcggccggtatcgctctgattgcctatcttgctttggcactcggttttgtcaattcacgcactattttcgcctacttaatcggcatcggcctgctgctgccgttttggcggttgctgtcgggcaagtccggcaaccgtactgttcttacgtctttattcgccttatcgctggttttcgttatacagctgggaatcggcacgctgatcgattggttttccgaaacccaatatcaaaccgctttagctcgtgcagacagctccgctttcagcggttccgtgcgcgacatagaaggcagaaaagcctggtctctgtttatgaatgcaccgctgtggggacacggctggggtagctacgcgctgcagggattcattctgcacggggaaagcggcggttttaccaacaacctgctcaatgttttgtttacccactgccacaacctaatcttgcaattactggcagaaatgggattggcaggtacgcttgttgttggtctcggatttctcgttgccattagaaaactcctgatgcgtcccgcacatcctgcagctttcttcctgttggcagccatgacggtaactttgtgccacagcatgcttgaataccctttgtggtatgtctatttcttatccgtcttcggcctaatgatcgcgctctctccttcaaataactacagttcttgggctgttgccaaaacacactatgcaggagccatcgttccggtcgtattactggccggacttgccaaccttacccatacctattcgcaacttaccgaatatagcagccgcaccaaaagcgacacaccggccgacattgccctcaaaatacacggccttaaccatattgccgaaaacgagcctctcttgcgctactacgcacaactggcactcacccgccgtgccgaacccagtcaagaaaccattcaaccttgggcacagcaagcggctttggaagcgttgactttccgtccgtatgccaatgcctatcaagtcggcctttatcaataccgaaaccgccaacaccaagaagccgaagcctggttggaaaaaatgtatttgtattacccctacaccatgccgttttacacttctaaaatacgcagcaatcccgaattacaccccttgctgtcccaaatcgaaaaaacctgcaaacaatttaatgttttaagacccaacagcaaaccgtgcttatag

SEQ ID NO: 47 - protein, 601 aa, Neisseria weaveri
MFDAQTFQHRLFSKALLPLWFCFLWICALPFLMIYRVGPLSSFYIEAVSLSGILLFLLLSSLSGRLKNRLPAAFFYFMLLAAFWWIQARVMDLTYPGISDMAAWSFLIIALGAWACRSWIEDFGHETVVSVFASALLIGAVLQAAVAIMQFTGWASADFLHGIVSYKGLREVNGQLGQRNHLGHYLMWGIMAAAYLWNIRRLPTAAGIALIAYLALALGFVNSRTIFAYLIGIGLLLPFWRLLSGKSGNRTVLTSLFALSLVFVIQLGIGTLIDWFSETQYQTALARADSSAFSGSVRDIEGRKAWSLFMNAPLWGHGWGSYALQGFILHGESGGFTNNLLNVLFTHCHNLILQLLAEMGLAGTLVVGLGFLVAIRKLLMRPAHPAAFFLLAAMTVTLCHSMLEYPLWYVYFLSVFGLMIALSPSNNYSSWAVAKTHYAGAIVPVVLLAGLANLTHTYSQLTEYSSRTKSDTPADIALKIHGLNHIAENEPLLRYYAQLALTRRAEPSQETIQPWAQQAALEALTFRPYANAYQVGLYQYRNRQHQEAEAWLEKMYLYYPYTMPFYTSKIRSNPELHPLLSQIEKTCKQFNVLRPNSKPCL

SEQ ID NO: 48 - DNA, 1833 bp, Neisseria macacae
atgtttatgcgtttttcagacgaccttaagagtgaatgggacagacgtttgttgccgttgtggtgctgtttcttgtggatatgcgccgcgccgtttttgtccttctaccgcgtgggtccgttgtcgagtttttatctggaagcggcttcgcttctgggcgcgctgatgctggtgttggtgacggcgtataagggtttgttgagcgttcgtctgccgaaggcggccgtcggtttgctggttttggcggcattttggtggctgcaggcgcggatgatggatttgatttacgtcggcatgaacgatatggtgatgtggacgtttatcattctggctttggcggtatgggcttgccgcggctgggtggcggcctacgggcaggaacgcattgtgacggtgtttgcgtggtcgctgctgtttggtacgttgctgcaggctgcgattgcgtttatacagtttaagggctggtacgatcttgggttcctgcgcaacatgattgtgtatagcggaaaagaggttagtggtcagcttgggcagcgcaaccacctcgggcattatttgatgtggggtgttttggcggcggcttatttgtggtcaacccgcaaaatgccgggctggctgggatttttgttggtcttcctgatgacggctgtcttgggcttggtcaactcgcgcacgattctgggctatgtggccggcgtggcgttgattttgcctgtgtggcgttggcgtgcgggacgggattctgcgaggctggtgcggatatttttcctgacggtcgcgttggtggcggtatttcaatttgcgatgggttcgattttagaactgctgggcaacggtcaatatgaaacggcggtcgaacgcgccggaaacagcggttttgaaggatcgatgcgtcagattgaatggcgtaaagcctggactgcctttttgtccgcaccttggttcggacacggctggaacagctttgctcaacagactttctggattaatgcggagcagcagtatttcccgaataatatcttaggcgttttgtttacccattcgcacaatattgttttacaactgctctccgaagtcgggctggtcggtacggtattggttgccctgacgatgcttgcggggctgtggcggatgctggtgcgtccttaccatccggcttcgctgctgctgctgtctatggttgctgtcagtatgtgccacagtatgctggagtacccattgtggtatatctatttcctgacgccgtttgtgttgatgttcgcactcgcgccggcacgttatgaagacgtttcagacgacctcgcttggatgcgcggccgcaattgggcgggcgggcttgctacgttgctgattatcggcgggctgctgcatatgggctggacgtataccgatttggtcgattacagccggattccgaaaaatgaaagtacggagatggcggggcggaagattaacggtttgcgccatatttccgaaaccagcccgatgctggcttattatgccgacctcagcctgacccgccgtgccgagccgaccgatatgcaggtcaaaccttgggcggagaaggcggcgatcgattccttgtcttaccgcccgtattccaacgcatatcaggtggcgctgtatctctaccggcaaggcaagaaggaagagggcgcgaaatggatgcaggcgatgcagtattattatccgtacatgatgtcgttttacgcgggcaagctgcgcagccatcccgtgttccaaccgcttttgcccaagctgctggcggactgcaaagatttcgtcaatgcgcctaagcacgaaaaagcgaagtcttgcgatgttgtgcaataa

SEQ ID NO: 49 - protein, 610 aa, Neisseria macacae
MFMRFSDDLKSEWDRRLLPLWCCFLWICAAPFLSFYRVGPLSSFYLEAASLLGALMLVLVTAYKGLLSVRLPKAAVGLLVLAAFWWLQARMMDLIYVGMNDMVMWTFIILALAVWACRGWVAAYGQERIVTVFAWSLLFGTLLQAAIAFIQFKGWYDLGFLRNMIVYSGKEVSGQLGQRNHLGHYLMWGVLAAAYLWSTRKMPGWLGFLLVFLMTAVLGLVNSRTILGYVAGVALILPVWRWRAGRDSARLVRIFFLTVALVAVFQFAMGSILELLGNGQYETAVERAGNSGFEGSMRQIEWRKAWTAFLSAPWFGHGWNSFAQQTFWINAEQQYFPNNILGVLFTHSHNIVLQLLSEVGLVGTVLVALTMLAGLWRMLVRPYHPASLLLLSMVAVSMCHSMLEYPLWYIYFLTPFVLMFALAPARYEDVSDDLAWMRGRNWAGGLATLLIIGGLLHMGWTYTDLVDYSRIPKNESTEMAGRKINGLRHISETSPMLAYYADLSLTRRAEPTDMQVKPWAEKAAIDSLSYRPYSNAYQVALYLYRQGKKEEGAKWMQAMQYYYPYMMSFYAGKLRSHPVFQPLLPKLLADCKDFVNAPKHEKAKSCDVVQ

SEQ ID NO: 50 - DNA, 2001 bp, Artificial Sequence
  source: /note="Description of Artificial Sequence: Synthetic polynucleotide"
atgaaaaagatttggctggcgctggctggtttagttttagcgtttagcgctagcgcctcagccgttaccgagtattacctgaatcacggcgaatggcccggcaacaacacttctgccggcgtggcaacctcctctgaaatcaaagccgaggaagccttcgacctctggaacgaatgcgccaaggcctgcgtgctcgacctcaaggacggcgtgcgttccagccgcatgagcgtcgacccggccatcgccgacaccaacggccagggcgtgctgcactactccatggtcctggagggcggcaacgacgcgctcaagctggccatcgacaacgccctcagcatcaccagcgacggcctgaccatccgcctcgaaggcggcgtcgagccgaacaagccggtgcgctacagctacacgcgccaggcgcgcggcagttggtcgctgaactggctggtaccgatcggccacgagaagccctcgaacatcaaggtgttcatccacgaactgaacgccggtaaccagctcagccacatgtcgccgatctacaccatcgagatgggcgacgagttgctggcgaagctggcgcgcgatgccaccttcttcgtcagggcgcacgagagcaacgagatgcagccgacgctcgccatcagccatgccggggtcagcgtggtcatggctcaggcccagccgcgccgggaaaagcgctggagcgaatgggccagcggcaaggtgttgtgcctgctcgacccgctggacggggtctacaactacctcgcccagcagcgctgcaacctcgacgatacctgggaaggcaagatctaccgggtgctcgccggcaacccggcgaagcatgacctggacatcaagcccacggtcatcagtcatcgcctgcatttccccgagggcggcagcctggccgcgctgaccgcgcaccaggcctgccacctgccgctggaggccttcactcgtcatcgccagccgcgcggctgggaacaactggagcagtgcggctatccggtgcagcggctggtcgccctctacctggcggcgcgactgtcgtggaaccaggtcgaccaggtgatccgcaacgccctggccagccccggcagcggcggcgacctgggcgaagcgatccgcgagcagccggagcaggcccgtctggccctgaccctggccgccgccgagagcgagcgcttcgtccggcagggcaccggcaacgacgaggccggcgcggccagcgccgacgtggtgagcctgacctgcccggtcgccgccggtgaatgcgcgggcccggcggacagcggcgacgccctgctggagcgcaactatcccactggcgcggagttcctcggcgacggcggcgacgtcagcttcagcacccgcggcacgcagaactggacggtggagcggctgctccaggcgcaccgccaactggaggagcgcggctatgtgttcgtcggctaccacggcaccttcctcgaagcggcgcaaagcatcgtcttcggcggggtgcgcgcgcgcagccaggacctcgacgcgatctggcgcggtttctatatcgccggcgatccggcgctggcctacggctacgcccaggaccaggaacccgacgcgcgcggccggatccgcaacggtgccctgctgcgggtctatgtgccgcgctggagtctgccgggcttctaccgcaccggcctgaccctggccgcgccggaggcggcgggcgaggtcgaacggctgatcggccatccgctgccgctgcgcctggacgccatcaccggccccgaggaggaaggcgggcgcgtgaccattctcggctggccgctggccgagcgcaccgtggtgattccctcggcgatccccaccgacccgcgcaacgtcggcggcgacctcgacccgtccagcatccccgacaaggaacaggcgatcagcgccctgccggactacgccagccagcccggcaaaccgccgcgcgaggacttgaagcaccaccaccaccaccactga

SEQ ID NO: 51 - protein, 666 aa, Artificial Sequence
  source: /note="Description of Artificial Sequence: Synthetic polypeptide"
MKKIWLALAGLVLAFSASASAVTEYYLNHGEWPGNNTSAGVATSSEIKAEEAFDLWNECAKACVLDLKDGVRSSRMSVDPAIADTNGQGVLHYSMVLEGGNDALKLAIDNALSITSDGLTIRLEGGVEPNKPVRYSYTRQARGSWSLNWLVPIGHEKPSNIKVFIHELNAGNQLSHMSPIYTIEMGDELLAKLARDATFFVRAHESNEMQPTLAISHAGVSVVMAQAQPRREKRWSEWASGKVLCLLDPLDGVYNYLAQQRCNLDDTWEGKIYRVLAGNPAKHDLDIKPTVISHRLHFPEGGSLAALTAHQACHLPLEAFTRHRQPRGWEQLEQCGYPVQRLVALYLAARLSWNQVDQVIRNALASPGSGGDLGEAIREQPEQARLALTLAAAESERFVRQGTGNDEAGAASADVVSLTCPVAAGECAGPADSGDALLERNYPTGAEFLGDGGDVSFSTRGTQNWTVERLLQAHRQLEERGYVFVGYHGTFLEAAQSIVFGGVRARSQDLDAIWRGFYIAGDPALAYGYAQDQEPDARGRIRNGALLRVYVPRWSLPGFYRTGLTLAAPEAAGEVERLIGHPLPLRLDAITGPEEEGGRVTILGWPLAERTVVIPSAIPTDPRNVGGDLDPSSIPDKEQAISALPDYASQPGKPPREDLKHHHHHH

SEQ ID NO: 52 - DNA, 1998 bp, Artificial Sequence
  source: /note="Description of Artificial Sequence: Synthetic polynucleotide"
atgaaaaagatttggctggcgctggctggtttagttttagcgtttagcgctagcgccgccgaggaagccttcgacctctggaacgaatgcgccaaggcctgcgtgctcgacctcaaggacggcgtgcgttccagccgcatgagcgtcgacccggccatcgccgacaccaacggccagggcgtgctgcactactccatggtcctggagggcggcaacgacgcgctcaagctggccatcgacaacgccctcagcatcaccagcgacggcctgaccatccgcctcgaaggcggcgtcgagccgaacaagccggtgcgctacagctacacgcgccaggcgcgcggcagttggtcgctgaactggctggtaccgatcggccacgagaagccctcgaacatcaaggtgttcatccacgaactgaacgccggtaaccagctcagccacatgtcgccgatctacaccatcgagatgggcgacgagttgctggcgaagctggcgcgcgatgccaccttcttcgtcagggcgcacgagagcaacgagatgcagccgacgctcgccatcagccatgccggggtcagcgtggtcatggctcaggcccagccgcgccgggaaaagcgctggagcgaatgggccagcggcaaggtgttgtgcctgctcgacccgctggacggggtctacaactacctcgcccagcagcgctgcaacctcgacgatacctgggaaggcaagatctaccgggtgctcgccggcaacccggcgaagcatgacctggacatcaagcccacggtcatcagtcatcgcctgcatttccccgagggcggcagcctggccgcgctgaccgcgcaccaggcctgccacctgccgctggaggccttcactcgtcatcgccagccgcgcggctgggaacaactggagcagtgcggctatccggtgcagcggctggtcgccctctacctggcggcgcgactgtcgtggaaccaggtcgaccaggtgatccgcaacgccctggccagccccggcagcggcggcgacctgggcgaagcgatccgcgagcagccggagcaggcccgtctggccctgaccctggccgccgccgagagcgagcgcttcgtccggcagggcaccggcaacgacgaggccggcgcggccagcgccgacgtggtgagcctgacctgcccggtcgcctcagccgttaccgagtattacctgaatcacggcgaatggcccggcaacaacacttctgccggcgtggcaacctcctctgaaatcaaaggtgaatgcgcgggcccggcggacagcggcgacgccctgctggagcgcaactatcccactggcgcggagttcctcggcgacggcggcgacgtcagcttcagcacccgcggcacgcagaactggacggtggagcggctgctccaggcgcaccgccaactggaggagcgcggctatgtgttcgtcggctaccacggcaccttcctcgaagcggcgcaaagcatcgtcttcggcggggtgcgcgcgcgcagccaggacctcgacgcgatctggcgcggtttctatatcgccggcgatccggcgctggcctacggctacgcccaggaccaggaacccgacgcgcgcggccggatccgcaacggtgccctgctgcgggtctatgtgccgcgctggagtctgccgggcttctaccgcaccggcctgaccctggccgcgccggaggcggcgggcgaggtcgaacggctgatcggccatccgctgccgctgcgcctggacgccatcaccggccccgaggaggaaggcgggcgcgtgaccattctcggctggccgctggccgagcgcaccgtggtgattccctcggcgatccccaccgacccgcgcaacgtcggcggcgacctcgacccgtccagcatccccgacaaggaacaggcgatcagcgccctgccggactacgccagccagcccggcaaaccgccgcgcgaggacttgaagcaccaccaccaccaccactga

SEQ ID NO: 53 - protein, 665 aa, Artificial Sequence
  source: /note="Description of Artificial Sequence: Synthetic polypeptide"
MKKIWLALAGLVLAFSASAAEEAFDLWNECAKACVLDLKDGVRSSRMSVDPAIADTNGQGVLHYSMVLEGGNDALKLAIDNALSITSDGLTIRLEGGVEPNKPVRYSYTRQARGSWSLNWLVPIGHEKPSNIKVFIHELNAGNQLSHMSPIYTIEMGDELLAKLARDATFFVRAHESNEMQPTLAISHAGVSVVMAQAQPRREKRWSEWASGKVLCLLDPLDGVYNYLAQQRCNLDDTWEGKIYRVLAGNPAKHDLDIKPTVISHRLHFPEGGSLAALTAHQACHLPLEAFTRHRQPRGWEQLEQCGYPVQRLVALYLAARLSWNQVDQVIRNALASPGSGGDLGEAIREQPEQARLALTLAAAESERFVRQGTGNDEAGAASADVVSLTCPVASAVTEYYLNHGEWPGNNTSAGVATSSEIKGECAGPADSGDALLERNYPTGAEFLGDGGDVSFSTRGTQNWTVERLLQAHRQLEERGYVFVGYHGTFLEAAQSIVFGGVRARSQDLDAIWRGFYIAGDPALAYGYAQDQEPDARGRIRNGALLRVYVPRWSLPGFYRTGLTLAAPEAAGEVERLIGHPLPLRLDAITGPEEEGGRVTILGWPLAERTVVIPSAIPTDPRNVGGDLDPSSIPDKEQAISALPDYASQPGKPPREDLKHHHHHH

SEQ ID NO: 54 - DNA, 2001 bp, Artificial Sequence
  source: /note="Description of Artificial Sequence: Synthetic polynucleotide"
atgaaaaagatttggctggcgctggctggtttagttttagcgtttagcgctagcgccgccgaggaagccttcgacctctggaacgaatgcgccaaggcctgcgtgctcgacctcaaggacggcgtgcgttccagccgcatgagcgtcgacccggccatcgccgacaccaacggccagggcgtgctgcactactccatggtcctggagggcggcaacgacgcgctcaagctggccatcgacaacgccctcagcatcaccagcgacggcctgaccatccgcctcgaaggcggcgtcgagccgaacaagccggtgcgctacagctacacgcgccaggcgcgcggcagttggtcgctgaactggctggtaccgatcggccacgagaagccctcgaacatcaaggtgttcatccacgaactgaacgccggtaaccagctcagccacatgtcgccgatctacaccatcgagatgggcgacgagttgctggcgaagctggcgcgcgatgccaccttcttcgtcagggcgcacgagagcaacgagatgcagccgacgctcgccatcagccatgccggggtcagcgtggtcatggctcaggcccagccgcgccgggaaaagcgctggagcgaatgggccagcggcaaggtgttgtgcctgctcgacccgctggacggggtctacaactacctcgcccagcagcgctgcaacctcgacgatacctgggaaggcaagatctaccgggtgctcgccggcaacccggcgaagcatgacctggacatcaagcccacggtcatcagtcatcgcctgcatttccccgagggcggcagcctggccgcgctgaccgcgcaccaggcctgccacctgccgctggaggccttcactcgtcatcgccagccgcgcggctgggaacaactggagcagtgcggctatccggtgcagcggctggtcgccctctacctggcggcgcgactgtcgtggaaccaggtcgaccaggtgatccgcaacgccctggccagccccggcagcggcggcgacctgggcgaagcgatccgcgagcagccggagcaggcccgtctggccctgaccctggccgccgccgagagcgagcgcttcgtccggcagggcaccggcaacgacgaggccggcgcggccagcgccgacgtggtgagcctgacctgcccggtcgccgccggtgaatgcgcgggcccggcggacagcggcgacgccctgctggagcgcaactatcccactggcgcggagttcctcggcgacggcggcgacgtcagcttcagcacccgcggcacgcagaactggacggtggagcggctgctccaggcgcaccgccaactggaggagcgcggctatgtgttcgtcggctaccacggcaccttcctcgaagcggcgcaaagcatcgtcttcggcggggtgcgcgcgcgcagccaggacctcgacgcgatctggcgcggtttctatatcgccggcgatccggcgctggcctacggctacgcccaggaccaggaacccgacgcgcgcggccggatccgcaacggtgccctgctgcgggtctatgtgccgcgctggagtctgccgggcttctaccgcaccggcctgaccctggccgcgccggaggcggcgggcgaggtcgaacggctgatcggccatccgctgccgctgcgcctggacgccatcaccggccccgaggaggaaggcgggcgcgtgaccattctcggctggccgctggccgagcgcaccgtggtgattccctcggcgatccccaccgacccgcgcaacgtcggcggcgacctcgacccgtccagcatccccgacaaggaacaggcgatcagcgccctgccggactacgccagccagcccggcaaaccgccgcgcgaggacttgaagtcagccgttaccgagtattacctgaatcacggcgaatggcccggcaacaacacttctgccggcgtggcaacctcctctgaaatcaaacaccaccaccaccaccactga

SEQ ID NO: 55 - protein, 666 aa, Artificial Sequence
  source: /note="Description of Artificial Sequence: Synthetic polypeptide"
MKKIWLALAGLVLAFSASAAEEAFDLWNECAKACVLDLKDGVRSSRMSVDPAIADTNGQGVLHYSMVLEGGNDALKLAIDNALSITSDGLTIRLEGGVEPNKPVRYSYTRQARGSWSLNWLVPIGHEKPSNIKVFIHELNAGNQLSHMSPIYTIEMGDELLAKLARDATFFVRAHESNEMQPTLAISHAGVSVVMAQAQPRREKRWSEWASGKVLCLLDPLDGVYNYLAQQRCNLDDTWEGKIYRVLAGNPAKHDLDIKPTVISHRLHFPEGGSLAALTAHQACHLPLEAFTRHRQPRGWEQLEQCGYPVQRLVALYLAARLSWNQVDQVIRNALASPGSGGDLGEAIREQPEQARLALTLAAAESERFVRQGTGNDEAGAASADVVSLTCPVAAGECAGPADSGDALLERNYPTGAEFLGDGGDVSFSTRGTQNWTVERLLQAHRQLEERGYVFVGYHGTFLEAAQSIVFGGVRARSQDLDAIWRGFYIAGDPALAYGYAQDQEPDARGRIRNGALLRVYVPRWSLPGFYRTGLTLAAPEAAGEVERLIGHPLPLRLDAITGPEEEGGRVTILGWPLAERTVVIPSAIPTDPRNVGGDLDPSSIPDKEQAISALPDYASQPGKPPREDLKSAVTEYYLNHGEWPGNNTSAGVATSSEIKHHHHHH

SEQ ID NO: 56 - DNA, 1998 bp, Artificial Sequence
  source: /note="Description of Artificial Sequence: Synthetic polynucleotide"
atgaaaaagatttggctggcgctggctggtttagttttagcgtttagcgctagcgccgccgaggaagccttcgacctctggaacgaatgcgccaagagcgcggtgaccgagtactatctgaaccacggtgaatggccgggcaacaacaccagcgcgggtgttgcgaccagcagcgagatcaagtgcgtgctcgacctcaaggacggcgtgcgttccagccgcatgagcgtcgacccggccatcgccgacaccaacggccagggcgtgctgcactactccatggtcctggagggcggcaacgacgcgctcaagctggccatcgacaacgccctcagcatcaccagcgacggcctgaccatccgcctcgaaggcggcgtcgagccgaacaagccggtgcgctacagctacacgcgccaggcgcgcggcagttggtcgctgaactggctggtaccgatcggccacgagaagccctcgaacatcaaggtgttcatccacgaactgaacgccggtaaccagctcagccacatgtcgccgatctacaccatcgagatgggcgacgagttgctggcgaagctggcgcgcgatgccaccttcttcgtcagggcgcacgagagcaacgagatgcagccgacgctcgccatcagccatgccggggtcagcgtggtcatggctcaggcccagccgcgccgggaaaagcgctggagcgaatgggccagcggcaaggtgttgtgcctgctcgacccgctggacggggtctacaactacctcgcccagcagcgctgcaacctcgacgatacctgggaaggcaagatctaccgggtgctcgccggcaacccggcgaagcatgacctggacatcaagcccacggtcatcagtcatcgcctgcatttccccgagggcggcagcctggccgcgctgaccgcgcaccaggcctgccacctgccgctggaggccttcactcgtcatcgccagccgcgcggctgggaacaactggagcagtgcggctatccggtgcagcggctggtcgccctctacctggcggcgcgactgtcgtggaaccaggtcgaccaggtgatccgcaacgccctggccagccccggcagcggcggcgacctgggcgaagcgatccgcgagcagccggagcaggcccgtctggccctgaccctggccgccgccgagagcgagcgcttcgtccggcagggcaccggcaacgacgaggccggcgcggccagcgccgacgtggtgagcctgacctgcccggtcgccgccggtgaatgcgcgggcccggcggacagcggcgacgccctgctggagcgcaactatcccactggcgcggagttcctcggcgacggcggcgacgtcagcttcagcacccgcggcacgcagaactggacggtggagcggctgctccaggcgcaccgccaactggaggagcgcggctatgtgttcgtcggctaccacggcaccttcctcgaagcggcgcaaagcatcgtcttcggcggggtgcgcgcgcgcagccaggacctcgacgcgatctggcgcggtttctatatcgccggcgatccggcgctggcctacggctacgcccaggaccaggaacccgacgcgcgcggccggatccgcaacggtgccctgctgcgggtctatgtgccgcgctggagtctgccgggcttctaccgcaccggcctgaccctggccgcgccggaggcggcgggcgaggtcgaacggctgatcggccatccgctgccgctgcgcctggacgccatcaccggccccgaggaggaaggcgggcgcgtgaccattctcggctggccgctggccgagcgcaccgtggtgattccctcggcgatccccaccgacccgcgcaacgtcggcggcgacctcgacccgtccagcatccccgacaaggaacaggcgatcagcgccctgccggactacgccagccagcccggcaaaccgccgcgcgaggacttgaagcaccaccaccaccaccactga

SEQ ID NO: 57 - protein, 665 aa, Artificial Sequence
  source: /note="Description of Artificial Sequence: Synthetic polypeptide"
MKKIWLALAGLVLAFSASAAEEAFDLWNECAKSAVTEYYLNHGEWPGNNTSAGVATSSEIKCVLDLKDGVRSSRMSVDPAIADTNGQGVLHYSMVLEGGNDALKLAIDNALSITSDGLTIRLEGGVEPNKPVRYSYTRQARGSWSLNWLVPIGHEKPSNIKVFIHELNAGNQLSHMSPIYTIEMGDELLAKLARDATFFVRAHESNEMQPTLAISHAGVSVVMAQAQPRREKRWSEWASGKVLCLLDPLDGVYNYLAQQRCNLDDTWEGKIYRVLAGNPAKHDLDIKPTVISHRLHFPEGGSLAALTAHQACHLPLEAFTRHRQPRGWEQLEQCGYPVQRLVALYLAARLSWNQVDQVIRNALASPGSGGDLGEAIREQPEQARLALTLAAAESERFVRQGTGNDEAGAASADVVSLTCPVAAGECAGPADSGDALLERNYPTGAEFLGDGGDVSFSTRGTQNWTVERLLQAHRQLEERGYVFVGYHGTFLEAAQSIVFGGVRARSQDLDAIWRGFYIAGDPALAYGYAQDQEPDARGRIRNGALLRVYVPRWSLPGFYRTGLTLAAPEAAGEVERLIGHPLPLRLDAITGPEEEGGRVTILGWPLAERTVVIPSAIPTDPRNVGGDLDPSSIPDKEQAISALPDYASQPGKPPREDLKHHHHHH

SEQ ID NO: 58 - DNA, 1998 bp, Artificial Sequence
  source: /note="Description of Artificial Sequence: Synthetic polynucleotide"
atgaaaaagatttggctggcgctggctggtttagttttagcgtttagcgctagcgccgccgaggaagccttcgacctctggaacgaatgcgccaaggcctgcgtgctcgacctcaaggacggcgtgcgttccagccgcatgagcgtcgacccggccatcgccagcgcggtgaccgagtactatctgaaccacggtgaatggccgggcaacaacaccagcgcgggtgttgcgaccagcagcgagatcaagaccaacggccagggcgtgctgcactactccatggtcctggagggcggcaacgacgcgctcaagctggccatcgacaacgccctcagcatcaccagcgacggcctgaccatccgcctcgaaggcggcgtcgagccgaacaagccggtgcgctacagctacacgcgccaggcgcgcggcagttggtcgctgaactggctggtaccgatcggccacgagaagccctcgaacatcaaggtgttcatccacgaactgaacgccggtaaccagctcagccacatgtcgccgatctacaccatcgagatgggcgacgagttgctggcgaagctggcgcgcgatgccaccttcttcgtcagggcgcacgagagcaacgagatgcagccgacgctcgccatcagccatgccggggtcagcgtggtcatggctcaggcccagccgcgccgggaaaagcgctggagcgaatgggccagcggcaaggtgttgtgcctgctcgacccgctggacggggtctacaactacctcgcccagcagcgctgcaacctcgacgatacctgggaaggcaagatctaccgggtgctcgccggcaacccggcgaagcatgacctggacatcaagcccacggtcatcagtcatcgcctgcatttccccgagggcggcagcctggccgcgctgaccgcgcaccaggcctgccacctgccgctggaggccttcactcgtcatcgccagccgcgcggctgggaacaactggagcagtgcggctatccggtgcagcggctggtcgccctctacctggcggcgcgactgtcgtggaaccaggtcgaccaggtgatccgcaacgccctggccagccccggcagcggcggcgacctgggcgaagcgatccgcgagcagccggagcaggcccgtctggccctgaccctggccgccgccgagagcgagcgcttcgtccggcagggcaccggcaacgacgaggccggcgcggccagcgccgacgtggtgagcctgacctgcccggtcgccgccggtgaatgcgcgggcccggcggacagcggcgacgccctgctggagcgcaactatcccactggcgcggagttcctcggcgacggcggcgacgtcagcttcagcacccgcggcacgcagaactggacggtggagcggctgctccaggcgcaccgccaactggaggagcgcggctatgtgttcgtcggctaccacggcaccttcctcgaagcggcgcaaagcatcgtcttcggcggggtgcgcgcgcgcagccaggacctcgacgcgatctggcgcggtttctatatcgccggcgatccggcgctggcctacggctacgcccaggaccaggaacccgacgcgcgcggccggatccgcaacggtgccctgctgcgggtctatgtgccgcgctggagtctgccgggcttctaccgcaccggcctgaccctggccgcgccggaggcggcgggcgaggtcgaacggctgatcggccatccgctgccgctgcgcctggacgccatcaccggccccgaggaggaaggcgggcgcgtgaccattctcggctggccgctggccgagcgcaccgtggtgattccctcggcgatccccaccgacccgcgcaacgtcggcggcgacctcgacccgtccagcatccccgacaaggaacaggcgatcagcgccctgccggactacgccagccagcccggcaaaccgccgcgcgaggacttgaagcaccaccaccaccaccactga

SEQ ID NO: 59 - protein, 665 aa, Artificial Sequence
  source: /note="Description of Artificial Sequence: Synthetic polypeptide"
MKKIWLALAGLVLAFSASAAEEAFDLWNECAKACVLDLKDGVRSSRMSVDPAIASAVTEYYLNHGEWPGNNTSAGVATSSEIKTNGQGVLHYSMVLEGGNDALKLAIDNALSITSDGLTIRLEGGVEPNKPVRYSYTRQARGSWSLNWLVPIGHEKPSNIKVFIHELNAGNQLSHMSPIYTIEMGDELLAKLARDATFFVRAHESNEMQPTLAISHAGVSVVMAQAQPRREKRWSEWASGKVLCLLDPLDGVYNYLAQQRCNLDDTWEGKIYRVLAGNPAKHDLDIKPTVISHRLHFPEGGSLAALTAHQACHLPLEAFTRHRQPRGWEQLEQCGYPVQRLVALYLAARLSWNQVDQVIRNALASPGSGGDLGEAIREQPEQARLALTLAAAESERFVRQGTGNDEAGAASADVVSLTCPVAAGECAGPADSGDALLERNYPTGAEFLGDGGDVSFSTRGTQNWTVERLLQAHRQLEERGYVFVGYHGTFLEAAQSIVFGGVRARSQDLDAIWRGFYIAGDPALAYGYAQDQEPDARGRIRNGALLRVYVPRWSLPGFYRTGLTLAAPEAAGEVERLIGHPLPLRLDAITGPEEEGGRVTILGWPLAERTVVIPSAIPTDPRNVGGDLDPSSIPDKEQAISALPDYASQPGKPPREDLKHHHHHH

SEQ ID NO: 60 - DNA, 1998 bp, Artificial Sequence
  source: /note="Description of Artificial Sequence: Synthetic polynucleotide"
atgaaaaagatttggctggcgctggctggtttagttttagcgtttagcgctagcgccgccgaggaagccttcgacctctggaacgaatgcgccaaggcctgcgtgctcgacctcaaggacggcgtgcgttccagccgcatgagcgtcgacccggccatcgccgacaccaacggccagggcgtgctgcactactccatggtcctggagggcggcaacgacgcgctcaagctggccatcgacaacgccctcagcatcaccagcgacggcctgaccatccgcctcgaaggcggcgtcgagccgaacaagccggtgcgctacagctacacgcgcagcgcggtgaccgagtactatctgaaccacggtgaatggccgggcaacaacaccagcgcgggtgttgcgaccagcagcgagatcaaggcgcgcggcagttggtcgctgaactggctggtaccgatcggccacgagaagccctcgaacatcaaggtgttcatccacgaactgaacgccggtaaccagctcagccacatgtcgccgatctacaccatcgagatgggcgacgagttgctggcgaagctggcgcgcgatgccaccttcttcgtcagggcgcacgagagcaacgagatgcagccgacgctcgccatcagccatgccggggtcagcgtggtcatggctcaggcccagccgcgccgggaaaagcgctggagcgaatgggccagcggcaaggtgttgtgcctgctcgacccgctggacggggtctacaactacctcgcccagcagcgctgcaacctcgacgatacctgggaaggcaagatctaccgggtgctcgccggcaacccggcgaagcatgacctggacatcaagcccacggtcatcagtcatcgcctgcatttccccgagggcggcagcctggccgcgctgaccgcgcaccaggcctgccacctgccgctggaggccttcactcgtcatcgccagccgcgcggctgggaacaactggagcagtgcggctatccggtgcagcggctggtcgccctctacctggcggcgcgactgtcgtggaaccaggtcgaccaggtgatccgcaacgccctggccagccccggcagcggcggcgacctgggcgaagcgatccgcgagcagccggagcaggcccgtctggccctgaccctggccgccgccgagagcgagcgcttcgtccggcagggcaccggcaacgacgaggccggcgcggccagcgccgacgtggtgagcctgacctgcccggtcgccgccggtgaatgcgcgggcccggcggacagcggcgacgccctgctggagcgcaactatcccactggcgcggagttcctcggcgacggcggcgacgtcagcttcagcacccgcggcacgcagaactggacggtggagcggctgctccaggcgcaccgccaactggaggagcgcggctatgtgttcgtcggctaccacggcaccttcctcgaagcggcgcaaagcatcgtcttcggcggggtgcgcgcgcgcagccaggacctcgacgcgatctggcgcggtttctatatcgccggcgatccggcgctggcctacggctacgcccaggaccaggaacccgacgcgcgcggccggatccgcaacggtgccctgctgcgggtctatgtgccgcgctggagtctgccgggcttctaccgcaccggcctgaccctggccgcgccggaggcggcgggcgaggtcgaacggctgatcggccatccgctgccgctgcgcctggacgccatcaccggccccgaggaggaaggcgggcgcgtgaccattctcggctggccgctggccgagcgcaccgtggtgattccctcggcgatccccaccgacccgcgcaacgtcggcggcgacctcgacccgtccagcatccccgacaaggaacaggcgatcagcgccctgccggactacgccagccagcccggcaaaccgccgcgcgaggacttgaagcaccaccaccaccaccactga

SEQ ID NO: 61 - protein, 665 aa, Artificial Sequence
  source: /note="Description of Artificial Sequence: Synthetic polypeptide"
MKKIWLALAGLVLAFSASAAEEAFDLWNECAKACVLDLKDGVRSSRMSVDPAIADTNGQGVLHYSMVLEGGNDALKLAIDNALSITSDGLTIRLEGGVEPNKPVRYSYTRSAVTEYYLNHGEWPGNNTSAGVATSSEIKARGSWSLNWLVPIGHEKPSNIKVFIHELNAGNQLSHMSPIYTIEMGDELLAKLARDATFFVRAHESNEMQPTLAISHAGVSVVMAQAQPRREKRWSEWASGKVLCLLDPLDGVYNYLAQQRCNLDDTWEGKIYRVLAGNPAKHDLDIKPTVISHRLHFPEGGSLAALTAHQACHLPLEAFTRHRQPRGWEQLEQCGYPVQRLVALYLAARLSWNQVDQVIRNALASPGSGGDLGEAIREQPEQARLALTLAAAESERFVRQGTGNDEAGAASADVVSLTCPVAAGECAGPADSGDALLERNYPTGAEFLGDGGDVSFSTRGTQNWTVERLLQAHRQLEERGYVFVGYHGTFLEAAQSIVFGGVRARSQDLDAIWRGFYIAGDPALAYGYAQDQEPDARGRIRNGALLRVYVPRWSLPGFYRTGLTLAAPEAAGEVERLIGHPLPLRLDAITGPEEEGGRVTILGWPLAERTVVIPSAIPTDPRNVGGDLDPSSIPDKEQAISALPDYASQPGKPPREDLKHHHHHH

SEQ ID NO: 62 - DNA, 1998 bp, Artificial Sequence
  source: /note="Description of Artificial Sequence: Synthetic polynucleotide"
atgaaaaagatttggctggcgctggctggtttagttttagcgtttagcgctagcgccgccgaggaagccttcgacctctggaacgaatgcgccaaggcctgcgtgctcgacctcaaggacggcgtgcgttccagccgcatgagcgtcgacccggccatcgccgacaccaacggccagggcgtgctgcactactccatggtcctggagggcggcaacgacgcgctcaagctggccatcgacaacgccctcagcatcaccagcgacggcctgaccatccgcctcgaaggcggcgtcgagccgaacaagccggtgcgctacagctacacgcgccaggcgcgcggcagttggtcgctgaactggctggtaccgatcggccacgagaagccctcgaacatcaaggtgttcatccacgaactgaacgccagcgcggtgaccgagtactatctgaaccacggtgaatggccgggcaacaacaccagcgcgggtgttgcgaccagcagcgagatcaagaaccagctcagccacatgtcgccgatctacaccatcgagatgggcgacgagttgctggcgaagctggcgcgcgatgccaccttcttcgtcagggcgcacgagagcaacgagatgcagccgacgctcgccatcagccatgccggggtcagcgtggtcatggctcaggcccagccgcgccgggaaaagcgctggagcgaatgggccagcggcaaggtgttgtgcctgctcgacccgctggacggggtctacaactacctcgcccagcagcgctgcaacctcgacgatacctgggaaggcaagatctaccgggtgctcgccggcaacccggcgaagcatgacctggacatcaagcccacggtcatcagtcatcgcctgcatttccccgagggcggcagcctggccgcgctgaccgcgcaccaggcctgccacctgccgctggaggccttcactcgtcatcgccagccgcgcggctgggaacaactggagcagtgcggctatccggtgcagcggctggtcgccctctacctggcggcgcgactgtcgtggaaccaggtcgaccaggtgatccgcaacgccctggccagccccggcagcggcggcgacctgggcgaagcgatccgcgagcagccggagcaggcccgtctggccctgaccctggccgccgccgagagcgagcgcttcgtccggcagggcaccggcaacgacgaggccggcgcggccagcgccgacgtggtgagcctgacctgcccggtcgccgccggtgaatgcgcgggcccggcggacagcggcgacgccctgctggagcgcaactatcccactggcgcggagttcctcggcgacggcggcgacgtcagcttcagcacccgcggcacgcagaactggacggtggagcggctgctccaggcgcaccgccaactggaggagcgcggctatgtgttcgtcggctaccacggcaccttcctcgaagcggcgcaaagcatcgtcttcggcggggtgcgcgcgcgcagccaggacctcgacgcgatctggcgcggtttctatatcgccggcgatccggcgctggcctacggctacgcccaggaccaggaacccgacgcgcgcggccggatccgcaacggtgccctgctgcgggtctatgtgccgcgctggagtctgccgggcttctaccgcaccggcctgaccctggccgcgccggaggcggcgggcgaggtcgaacggctgatcggccatccgctgccgctgcgcctggacgccatcaccggccccgaggaggaaggcgggcgcgtgaccattctcggctggccgctggccgagcgcaccgtggtgattccctcggcgatccccaccgacccgcgcaacgtcggcggcgacctcgacccgtccagcatccccgacaaggaacaggcgatcagcgccctgccggactacgccagccagcccggcaaaccgccgcgcgaggacttgaagcaccaccaccaccaccactga

SEQ ID NO: 63 - protein, 665 aa, Artificial Sequence
  source: /note="Description of Artificial Sequence: Synthetic polypeptide"
MKKIWLALAGLVLAFSASAAEEAFDLWNECAKACVLDLKDGVRSSRMSVDPAIADTNGQGVLHYSMVLEGGNDALKLAIDNALSITSDGLTIRLEGGVEPNKPVRYSYTRQARGSWSLNWLVPIGHEKPSNIKVFIHELNASAVTEYYLNHGEWPGNNTSAGVATSSEIKNQLSHMSPIYTIEMGDELLAKLARDATFFVRAHESNEMQPTLAISHAGVSVVMAQAQPRREKRWSEWASGKVLCLLDPLDGVYNYLAQQRCNLDDTWEGKIYRVLAGNPAKHDLDIKPTVISHRLHFPEGGSLAALTAHQACHLPLEAFTRHRQPRGWEQLEQCGYPVQRLVALYLAARLSWNQVDQVIRNALASPGSGGDLGEAIREQPEQARLALTLAAAESERFVRQGTGNDEAGAASADVVSLTCPVAAGECAGPADSGDALLERNYPTGAEFLGDGGDVSFSTRGTQNWTVERLLQAHRQLEERGYVFVGYHGTFLEAAQSIVFGGVRARSQDLDAIWRGFYIAGDPALAYGYAQDQEPDARGRIRNGALLRVYVPRWSLPGFYRTGLTLAAPEAAGEVERLIGHPLPLRLDAITGPEEEGGRVTILGWPLAERTVVIPSAIPTDPRNVGGDLDPSSIPDKEQAISALPDYASQPGKPPREDLKHHHHHH

SEQ ID NO: 64 - DNA, 1998 bp, Artificial Sequence
  source: /note="Description of Artificial Sequence: Synthetic polynucleotide"
atgaaaaagatttggctggcgctggctggtttagttttagcgtttagcgctagcgccgccgaggaagccttcgacctctggaacgaatgcgccaaggcctgcgtgctcgacctcaaggacggcgtgcgttccagccgcatgagcgtcgacccggccatcgccgacaccaacggccagggcgtgctgcactactccatggtcctggagggcggcaacgacgcgctcaagctggccatcgacaacgccctcagcatcaccagcgacggcctgaccatccgcctcgaaggcggcgtcgagccgaacaagccggtgcgctacagctacacgcgccaggcgcgcggcagttggtcgctgaactggctggtaccgatcggccacgagaagccctcgaacatcaaggtgttcatccacgaactgaacgccggtaaccagctcagccacatgtcgccgatctacaccatcgagatgggcgacgagttgctggcgaagctggcgcgcgatgccaccttcttcgtcagggcgcacagcgcggtgaccgagtactatctgaaccacggtgaatggccgggcaacaacaccagcgcgggtgttgcgaccagcagcgagatcaagagcaacgagatgcagccgacgctcgccatcagccatgccggggtcagcgtggtcatggctcaggcccagccgcgccgggaaaagcgctggagcgaatgggccagcggcaaggtgttgtgcctgctcgacccgctggacggggtctacaactacctcgcccagcagcgctgcaacctcgacgatacctgggaaggcaagatctaccgggtgctcgccggcaacccggcgaagcatgacctggacatcaagcccacggtcatcagtcatcgcctgcatttccccgagggcggcagcctggccgcgctgaccgcgcaccaggcctgccacctgccgctggaggccttcactcgtcatcgccagccgcgcggctgggaacaactggagcagtgcggctatccggtgcagcggctggtcgccctctacctggcggcgcgactgtcgtggaaccaggtcgaccaggtgatccgcaacgccctggccagccccggcagcggcggcgacctgggcgaagcgatccgcgagcagccggagcaggcccgtctggccctgaccctggccgccgccgagagcgagcgcttcgtccggcagggcaccggcaacgacgaggccggcgcggccagcgccgacgtggtgagcctgacctgcccggtcgccgccggtgaatgcgcgggcccggcggacagcggcgacgccctgctggagcgcaactatcccactggcgcggagttcctcggcgacggcggcgacgtcagcttcagcacccgcggcacgcagaactggacggtggagcggctgctccaggcgcaccgccaactggaggagcgcggctatgtgttcgtcggctaccacggcaccttcctcgaagcggcgcaaagcatcgtcttcggcggggtgcgcgcgcgcagccaggacctcgacgcgatctggcgcggtttctatatcgccggcgatccggcgctggcctacggctacgcccaggaccaggaacccgacgcgcgcggccggatccgcaacggtgccctgctgcgggtctatgtgccgcgctggagtctgccgggcttctaccgcaccggcctgaccctggccgcgccggaggcggcgggcgaggtcgaacggctgatcggccatccgctgccgctgcgcctggacgccatcaccggccccgaggaggaaggcgggcgcgtgaccattctcggctggccgctggccgagcgcaccgtggtgattccctcggcgatccccaccgacccgcgcaacgtcggcggcgacctcgacccgtccagcatccccgacaaggaacaggcgatcagcgccctgccggactacgccagccagcccggcaaaccgccgcgcgaggacttgaagcaccaccaccaccaccactga

SEQ ID NO: 65 - protein, 665 aa, Artificial Sequence
  source: /note="Description of Artificial Sequence: Synthetic polypeptide"
MKKIWLALAGLVLAFSASAAEEAFDLWNECAKACVLDLKDGVRSSRMSVDPAIADTNGQGVLHYSMVLEGGNDALKLAIDNALSITSDGLTIRLEGGVEPNKPVRYSYTRQARGSWSLNWLVPIGHEKPSNIKVFIHELNAGNQLSHMSPIYTIEMGDELLAKLARDATFFVRAHSAVTEYYLNHGEWPGNNTSAGVATSSEIKSNEMQPTLAISHAGVSVVMAQAQPRREKRWSEWASGKVLCLLDPLDGVYNYLAQQRCNLDDTWEGKIYRVLAGNPAKHDLDIKPTVISHRLHFPEGGSLAALTAHQACHLPLEAFTRHRQPRGWEQLEQCGYPVQRLVALYLAARLSWNQVDQVIRNALASPGSGGDLGEAIREQPEQARLALTLAAAESERFVRQGTGNDEAGAASADVVSLTCPVAAGECAGPADSGDALLERNYPTGAEFLGDGGDVSFSTRGTQNWTVERLLQAHRQLEERGYVFVGYHGTFLEAAQSIVFGGVRARSQDLDAIWRGFYIAGDPALAYGYAQDQEPDARGRIRNGALLRVYVPRWSLPGFYRTGLTLAAPEAAGEVERLIGHPLPLRLDAITGPEEEGGRVTILGWPLAERTVVIPSAIPTDPRNVGGDLDPSSIPDKEQAISALPDYASQPGKPPREDLKHHHHHH

SEQ ID NO: 66 - DNA, 1998 bp, Artificial Sequence
  source: /note="Description of Artificial Sequence: Synthetic polynucleotide"
atgaaaaagatttggctggcgctggctggtttagttttagcgtttagcgctagcgccgccgaggaagccttcgacctctggaacgaatgcgccaaggcctgcgtgctcgacctcaaggacggcgtgcgttccagccgcatgagcgtcgacccggccatcgccgacaccaacggccagggcgtgctgcactactccatggtcctggagggcggcaacgacgcgctcaagctggccatcgacaacgccctcagcatcaccagcgacggcctgaccatccgcctcgaaggcggcgtcgagccgaacaagccggtgcgctacagctacacgcgccaggcgcgcggcagttggtcgctgaactggctggtaccgatcggccacgagaagccctcgaacatcaaggtgttcatccacgaactgaacgccggtaaccagctcagccacatgtcgccgatctacaccatcgagatgggcgacgagttgctggcgaagctggcgcgcgatgccaccttcttcgtcagggcgcacgagagcaacgagatgcagccgacgctcgccatcagccatgccggggtcagcgtggtcatgagcgcggtgaccgagtactatctgaaccacggtgaatggccgggcaacaacaccagcgcgggtgttgcgaccagcagcgagatcaagcaggcccagccgcgccgggaaaagcgctggagcgaatgggccagcggcaaggtgttgtgcctgctcgacccgctggacggggtctacaactacctcgcccagcagcgctgcaacctcgacgatacctgggaaggcaagatctaccgggtgctcgccggcaacccggcgaagcatgacctggacatcaagcccacggtcatcagtcatcgcctgcatttccccgagggcggcagcctggccgcgctgaccgcgcaccaggcctgccacctgccgctggaggccttcactcgtcatcgccagccgcgcggctgggaacaactggagcagtgcggctatccggtgcagcggctggtcgccctctacctggcggcgcgactgtcgtggaaccaggtcgaccaggtgatccgcaacgccctggccagccccggcagcggcggcgacctgggcgaagcgatccgcgagcagccggagcaggcccgtctggccctgaccctggccgccgccgagagcgagcgcttcgtccggcagggcaccggcaacgacgaggccggcgcggccagcgccgacgtggtgagcctgacctgcccggtcgccgccggtgaatgcgcgggcccggcggacagcggcgacgccctgctggagcgcaactatcccactggcgcggagttcctcggcgacggcggcgacgtcagcttcagcacccgcggcacgcagaactggacggtggagcggctgctccaggcgcaccgccaactggaggagcgcggctatgtgttcgtcggctaccacggcaccttcctcgaagcggcgcaaagcatcgtcttcggcggggtgcgcgcgcgcagccaggacctcgacgcgatctggcgcggtttctatatcgccggcgatccggcgctggcctacggctacgcccaggaccaggaacccgacgcgcgcggccggatccgcaacggtgccctgctgcgggtctatgtgccgcgctggagtctgccgggcttctaccgcaccggcctgaccctggccgcgccggaggcggcgggcgaggtcgaacggctgatcggccatccgctgccgctgcgcctggacgccatcaccggccccgaggaggaaggcgggcgcgtgaccattctcggctggccgctggccgagcgcaccgtggtgattccctcggcgatccccaccgacccgcgcaacgtcggcggcgacctcgacccgtccagcatccccgacaaggaacaggcgatcagcgccctgccggactacgccagccagcccggcaaaccgccgcgcgaggacttgaagcaccaccaccaccaccactga

SEQ ID NO: 67 - protein, 665 aa, Artificial Sequence
  source: /note="Description of Artificial Sequence: Synthetic polypeptide"
MKKIWLALAGLVLAFSASAAEEAFDLWNECAKACVLDLKDGVRSSRMSVDPAIADTNGQGVLHYSMVLEGGNDALKLAIDNALSITSDGLTIRLEGGVEPNKPVRYSYTRQARGSWSLNWLVPIGHEKPSNIKVFIHELNAGNQLSHMSPIYTIEMGDELLAKLARDATFFVRAHESNEMQPTLAISHAGVSVVMSAVTEYYLNHGEWPGNNTSAGVATSSEIKQAQPRREKRWSEWASGKVLCLLDPLDGVYNYLAQQRCNLDDTWEGKIYRVLAGNPAKHDLDIKPTVISHRLHFPEGGSLAALTAHQACHLPLEAFTRHRQPRGWEQLEQCGYPVQRLVALYLAARLSWNQVDQVIRNALASPGSGGDLGEAIREQPEQARLALTLAAAESERFVRQGTGNDEAGAASADVVSLTCPVAAGECAGPADSGDALLERNYPTGAEFLGDGGDVSFSTRGTQNWTVERLLQAHRQLEERGYVFVGYHGTFLEAAQSIVFGGVRARSQDLDAIWRGFYIAGDPALAYGYAQDQEPDARGRIRNGALLRVYVPRWSLPGFYRTGLTLAAPEAAGEVERLIGHPLPLRLDAITGPEEEGGRVTILGWPLAERTVVIPSAIPTDPRNVGGDLDPSSIPDKEQAISALPDYASQPGKPPREDLKHHHHHH

SEQ ID NO: 68 - DNA, 1998 bp, Artificial Sequence
  source: /note="Description of Artificial Sequence: Synthetic polynucleotide"
atgaaaaagatttggctggcgctggctggtttagttttagcgtttagcgctagcgccgccgaggaagccttcgacctctggaacgaatgcgccaaggcctgcgtgctcgacctcaaggacggcgtgcgttccagccgcatgagcgtcgacccggccatcgccgacaccaacggccagggcgtgctgcactactccatggtcctggagggcggcaacgacgcgctcaagctggccatcgacaacgccctcagcatcaccagcgacggcctgaccatccgcctcgaaggcggcgtcgagccgaacaagccggtgcgctacagctacacgcgccaggcgcgcggcagttggtcgctgaactggctggtaccgatcggccacgagaagccctcgaacatcaaggtgttcatccacgaactgaacgccggtaaccagctcagccacatgtcgccgatctacaccatcgagatgggcgacgagttgctggcgaagctggcgcgcgatgccaccttcttcgtcagggcgcacgagagcaacgagatgcagccgacgctcgccatcagccatgccggggtcagcgtggtcatggctcaggcccagccgcgccgggaaaagcgctggagcgaatgggccagcggcaaggtgttgtgcctgctcgacccgctggacggggtctacaacagcgcggtgaccgagtactatctgaaccacggtgaatggccgggcaacaacaccagcgcgggtgttgcgaccagcagcgagatcaagctcgcccagcagcgctgcaacctcgacgatacctgggaaggcaagatctaccgggtgctcgccggcaacccggcgaagcatgacctggacatcaagcccacggtcatcagtcatcgcctgcatttccccgagggcggcagcctggccgcgctgaccgcgcaccaggcctgccacctgccgctggaggccttcactcgtcatcgccagccgcgcggctgggaacaactggagcagtgcggctatccggtgcagcggctggtcgccctctacctggcggcgcgactgtcgtggaaccaggtcgaccaggtgatccgcaacgccctggccagccccggcagcggcggcgacctgggcgaagcgatccgcgagcagccggagcaggcccgtctggccctgaccctggccgccgccgagagcgagcgcttcgtccggcagggcaccggcaacgacgaggccggcgcggccagcgccgacgtggtgagcctgacctgcccggtcgccgccggtgaatgcgcgggcccggcggacagcggcgacgccctgctggagcgcaactatcccactggcgcggagttcctcggcgacggcggcgacgtcagcttcagcacccgcggcacgcagaactggacggtggagcggctgctccaggcgcaccgccaactggaggagcgcggctatgtgttcgtcggctaccacggcaccttcctcgaagcggcgcaaagcatcgtcttcggcggggtgcgcgcgcgcagccaggacctcgacgcgatctggcgcggtttctatatcgccggcgatccggcgctggcctacggctacgcccaggaccaggaacccgacgcgcgcggccggatccgcaacggtgccctgctgcgggtctatgtgccgcgctggagtctgccgggcttctaccgcaccggcctgaccctggccgcgccggaggcggcgggcgaggtcgaacggctgatcggccatccgctgccgctgcgcctggacgccatcaccggccccgaggaggaaggcgggcgcgtgaccattctcggctggccgctggccgagcgcaccgtggtgattccctcggcgatccccaccgacccgcgcaacgtcggcggcgacctcgacccgtccagcatccccgacaaggaacaggcgatcagcgccctgccggactacgccagccagcccggcaaaccgccgcgcgaggacttgaagcaccaccaccaccaccactga

SEQ ID NO: 69 - protein, 665 aa, Artificial Sequence
  source: /note="Description of Artificial Sequence: Synthetic polypeptide"
MKKIWLALAGLVLAFSASAAEEAFDLWNECAKACVLDLKDGVRSSRMSVDPAIADTNGQGVLHYSMVLEGGNDALKLAIDNALSITSDGLTIRLEGGVEPNKPVRYSYTRQARGSWSLNWLVPIGHEKPSNIKVFIHELNAGNQLSHMSPIYTIEMGDELLAKLARDATFFVRAHESNEMQPTLAISHAGVSVVMAQAQPRREKRWSEWASGKVLCLLDPLDGVYNSAVTEYYLNHGEWPGNNTSAGVATSSEIKLAQQRCNLDDTWEGKIYRVLAGNPAKHDLDIKPTVISHRLHFPEGGSLAALTAHQACHLPLEAFTRHRQPRGWEQLEQCGYPVQRLVALYLAARLSWNQVDQVIRNALASPGSGGDLGEAIREQPEQARLALTLAAAESERFVRQGTGNDEAGAASADVVSLTCPVAAGECAGPADSGDALLERNYPTGAEFLGDGGDVSFSTRGTQNWTVERLLQAHRQLEERGYVFVGYHGTFLEAAQSIVFGGVRARSQDLDAIWRGFYIAGDPALAYGYAQDQEPDARGRIRNGALLRVYVPRWSLPGFYRTGLTLAAPEAAGEVERLIGHPLPLRLDAITGPEEEGGRVTILGWPLAERTVVIPSAIPTDPRNVGGDLDPSSIPDKEQAISALPDYASQPGKPPREDLKHHHHHH

SEQ ID NO: 70 - DNA, 1998 bp, Artificial Sequence
  source: /note="Description of Artificial Sequence: Synthetic polynucleotide"
atgaaaaagatttggctggcgctggctggtttagttttagcgtttagcgctagcgccgccgaggaagccttcgacctctggaacgaatgcgccaaggcctgcgtgctcgacctcaaggacggcgtgcgttccagccgcatgagcgtcgacccggccatcgccgacaccaacggccagggcgtgctgcactactccatggtcctggagggcggcaacgacgcgctcaagctggccatcgacaacgccctcagcatcaccagcgacggcctgaccatccgcctcgaaggcggcgtcgagccgaacaagccggtgcgctacagctacacgcgccaggcgcgcggcagttggtcgctgaactggctggtaccgatcggccacgagaagccctcgaacatcaaggtgttcatccacgaactgaacgccggtaaccagctcagccacatgtcgccgatctacaccatcgagatgggcgacgagttgctggcgaagctggcgcgcgatgccaccttcttcgtcagggcgcacgagagcaacgagatgcagccgacgctcgccatcagccatgccggggtcagcgtggtcatggctcaggcccagccgcgccgggaaaagcgctggagcgaatgggccagcggcaaggtgttgtgcctgctcgacccgctggacggggtctacaactacctcgcccagcagcgctgcaacctcgacgatacctgggaaggcaagatctaccgggtgctcgccggcagcgcggtgaccgagtactatctgaaccacggtgaatggccgggcaacaacaccagcgcgggtgttgcgaccagcagcgagatcaagccggcgaagcatgacctggacatcaagcccacggtcatcagtcatcgcctgcatttccccgagggcggcagcctggccgcgctgaccgcgcaccaggcctgccacctgccgctggaggccttcactcgtcatcgccagccgcgcggctgggaacaactggagcagtgcggctatccggtgcagcggctggtcgccctctacctggcggcgcgactgtcgtggaaccaggtcgaccaggtgatccgcaacgccctggccagccccggcagcggcggcgacctgggcgaagcgatccgcgagcagccggagcaggcccgtctggccctgaccctggccgccgccgagagcgagcgcttcgtccggcagggcaccggcaacgacgaggccggcgcggccagcgccgacgtggtgagcctgacctgcccggtcgccgccggtgaatgcgcgggcccggcggacagcggcgacgccctgctggagcgcaactatcccactggcgcggagttcctcggcgacggcggcgacgtcagcttcagcacccgcggcacgcagaactggacggtggagcggctgctccaggcgcaccgccaactggaggagcgcggctatgtgttcgtcggctaccacggcaccttcctcgaagcggcgcaaagcatcgtcttcggcggggtgcgcgcgcgcagccaggacctcgacgcgatctggcgcggtttctatatcgccggcgatccggcgctggcctacggctacgcccaggaccaggaacccgacgcgcgcggccggatccgcaacggtgccctgctgcgggtctatgtgccgcgctggagtctgccgggcttctaccgcaccggcctgaccctggccgcgccggaggcggcgggcgaggtcgaacggctgatcggccatccgctgccgctgcgcctggacgccatcaccggccccgaggaggaaggcgggcgcgtgaccattctcggctggccgctggccgagcgcaccgtggtgattccctcggcgatccccaccgacccgcgcaacgtcggcggcgacctcgacccgtccagcatccccgacaaggaacaggcgatcagcgccctgccggactacgccagccagcccggcaaaccgccgcgcgaggacttgaagcaccaccaccaccaccactga

SEQ ID NO: 71 - protein, 665 aa, Artificial Sequence
  source: /note="Description of Artificial Sequence: Synthetic polypeptide"
MKKIWLALAGLVLAFSASAAEEAFDLWNECAKACVLDLKDGVRSSRMSVDPAIADTNGQGVLHYSMVLEGGNDALKLAIDNALSITSDGLTIRLEGGVEPNKPVRYSYTRQARGSWSLNWLVPIGHEKPSNIKVFIHELNAGNQLSHMSPIYTIEMGDELLAKLARDATFFVRAHESNEMQPTLAISHAGVSVVMAQAQPRREKRWSEWASGKVLCLLDPLDGVYNYLAQQRCNLDDTWEGKIYRVLAGSAVTEYYLNHGEWPGNNTSAGVATSSEIKPAKHDLDIKPTVISHRLHFPEGGSLAALTAHQACHLPLEAFTRHRQPRGWEQLEQCGYPVQRLVALYLAARLSWNQVDQVIRNALASPGSGGDLGEAIREQPEQARLALTLAAAESERFVRQGTGNDEAGAASADVVSLTCPVAAGECAGPADSGDALLERNYPTGAEFLGDGGDVSFSTRGTQNWTVERLLQAHRQLEERGYVFVGYHGTFLEAAQSIVFGGVRARSQDLDAIWRGFYIAGDPALAYGYAQDQEPDARGRIRNGALLRVYVPRWSLPGFYRTGLTLAAPEAAGEVERLIGHPLPLRLDAITGPEEEGGRVTILGWPLAERTVVIPSAIPTDPRNVGGDLDPSSIPDKEQAISALPDYASQPGKPPREDLKHHHHHH

SEQ ID NO: 72 - DNA, 1998 bp, Artificial Sequence
  source: /note="Description of Artificial Sequence: Synthetic polynucleotide"
atgaaaaagatttggctggcgctggctggtttagttttagcgtttagcgctagcgccgccgaggaagccttcgacctctggaacgaatgcgccaaggcctgcgtgctcgacctcaaggacggcgtgcgttccagccgcatgagcgtcgacccggccatcgccgacaccaacggccagggcgtgctgcactactccatggtcctggagggcggcaacgacgcgctcaagctggccatcgacaacgccctcagcatcaccagcgacggcctgaccatccgcctcgaaggcggcgtcgagccgaacaagccggtgcgctacagctacacgcgccaggcgcgcggcagttggtcgctgaactggctggtaccgatcggccacgagaagccctcgaacatcaaggtgttcatccacgaactgaacgccggtaaccagctcagccacatgtcgccgatctacaccatcgagatgggcgacgagttgctggcgaagctggcgcgcgatgccaccttcttcgtcagggcgcacgagagcaacgagatgcagccgacgctcgccatcagccatgccggggtcagcgtggtcatggctcaggcccagccgcgccgggaaaagcgctggagcgaatgggccagcggcaaggtgttgtgcctgctcgacccgctggacggggtctacaactacctcgcccagcagcgctgcaacctcgacgatacctgggaaggcaagatctaccgggtgctcgccggcaacccggcgaagcatgacctggacatcaagcccacggtcatcagtcatcgcctgcatttccccagcgcggtgaccgagtactatctgaaccacggtgaatggccgggcaacaacaccagcgcgggtgttgcgaccagcagcgagatcaagggcggcagcctggccgcgctgaccgcgcaccaggcctgccacctgccgctggaggccttcactcgtcatcgccagccgcgcggctgggaacaactggagcagtgcggctatccggtgcagcggctggtcgccctctacctggcggcgcgactgtcgtggaaccaggtcgaccaggtgatccgcaacgccctggccagccccggcagcggcggcgacctgggcgaagcgatccgcgagcagccggagcaggcccgtctggccctgaccctggccgccgccgagagcgagcgcttcgtccggcagggcaccggcaacgacgaggccggcgcggccagcgccgacgtggtgagcctgacctgcccggtcgccgccggtgaatgcgcgggcccggcggacagcggcgacgccctgctggagcgcaactatcccactggcgcggagttcctcggcgacggcggcgacgtcagcttcagcacccgcggcacgcagaactggacggtggagcggctgctccaggcgcaccgccaactggaggagcgcggctatgtgttcgtcggctaccacggcaccttcctcgaagcggcgcaaagcatcgtcttcggcggggtgcgcgcgcgcagccaggacctcgacgcgatctggcgcggtttctatatcgccggcgatccggcgctggcctacggctacgcccaggaccaggaacccgacgcgcgcggccggatccgcaacggtgccctgctgcgggtctatgtgccgcgctggagtctgccgggcttctaccgcaccggcctgaccctggccgcgccggaggcggcgggcgaggtcgaacggctgatcggccatccgctgccgctgcgcctggacgccatcaccggccccgaggaggaaggcgggcgcgtgaccattctcggctggccgctggccgagcgcaccgtggtgattccctcggcgatccccaccgacccgcgcaacgtcggcggcgacctcgacccgtccagcatccccgacaaggaacaggcgatcagcgccctgccggactacgccagccagcccggcaaaccgccgcgcgaggacttgaagcaccaccaccaccaccactga

SEQ ID NO: 73 - protein, 665 aa, Artificial Sequence
  source: /note="Description of Artificial Sequence: Synthetic polypeptide"
MKKIWLALAGLVLAFSASAAEEAFDLWNECAKACVLDLKDGVRSSRMSVDPAIADTNGQGVLHYSMVLEGGNDALKLAIDNALSITSDGLTIRLEGGVEPNKPVRYSYTRQARGSWSLNWLVPIGHEKPSNIKVFIHELNAGNQLSHMSPIYTIEMGDELLAKLARDATFFVRAHESNEMQPTLAISHAGVSVVMAQAQPRREKRWSEWASGKVLCLLDPLDGVYNYLAQQRCNLDDTWEGKIYRVLAGNPAKHDLDIKPTVISHRLHFPSAVTEYYLNHGEWPGNNTSAGVATSSEIKGGSLAALTAHQACHLPLEAFTRHRQPRGWEQLEQCGYPVQRLVALYLAARLSWNQVDQVIRNALASPGSGGDLGEAIREQPEQARLALTLAAAESERFVRQGTGNDEAGAASADVVSLTCPVAAGECAGPADSGDALLERNYPTGAEFLGDGGDVSFSTRGTQNWTVERLLQAHRQLEERGYVFVGYHGTFLEAAQSIVFGGVRARSQDLDAIWRGFYIAGDPALAYGYAQDQEPDARGRIRNGALLRVYVPRWSLPGFYRTGLTLAAPEAAGEVERLIGHPLPLRLDAITGPEEEGGRVTILGWPLAERTVVIPSAIPTDPRNVGGDLDPSSIPDKEQAISALPDYASQPGKPPREDLKHHHHHH

SEQ ID NO: 74 - DNA, 1998 bp, Artificial Sequence
  source: /note="Description of Artificial Sequence: Synthetic polynucleotide"
atgaaaaagatttggctggcgctggctggtttagttttagcgtttagcgctagcgccgccgaggaagccttcgacctctggaacgaatgcgccaaggcctgcgtgctcgacctcaaggacggcgtgcgttccagccgcatgagcgtcgacccggccatcgccgacaccaacggccagggcgtgctgcactactccatggtcctggagggcggcaacgacgcgctcaagctggccatcgacaacgccctcagcatcaccagcgacggcctgaccatccgcctcgaaggcggcgtcgagccgaacaagccggtgcgctacagctacacgcgccaggcgcgcggcagttggtcgctgaactggctggtaccgatcggccacgagaagccctcgaacatcaaggtgttcatccacgaactgaacgccggtaaccagctcagccacatgtcgccgatctacaccatcgagatgggcgacgagttgctggcgaagctggcgcgcgatgccaccttcttcgtcagggcgcacgagagcaacgagatgcagccgacgctcgccatcagccatgccggggtcagcgtggtcatggctcaggcccagccgcgccgggaaaagcgctggagcgaatgggccagcggcaaggtgttgtgcctgctcgacccgctggacggggtctacaactacctcgcccagcagcgctgcaacctcgacgatacctgggaaggcaagatctaccgggtgctcgccggcaacccggcgaagcatgacctggacatcaagcccacggtcatcagtcatcgcctgcatttccccgagggcggcagcctggccgcgctgaccgcgcaccaggcctgccacctgccgctggaggccttcactagcgcggtgaccgagtactatctgaaccacggtgaatggccgggcaacaacaccagcgcgggtgttgcgaccagcagcgagatcaagcatcgccagccgcgcggctgggaacaactggagcagtgcggctatccggtgcagcggctggtcgccctctacctggcggcgcgactgtcgtggaaccaggtcgaccaggtgatccgcaacgccctggccagccccggcagcggcggcgacctgggcgaagcgatccgcgagcagccggagcaggcccgtctggccctgaccctggccgccgccgagagcgagcgcttcgtccggcagggcaccggcaacgacgaggccggcgcggccagcgccgacgtggtgagcctgacctgcccggtcgccgccggtgaatgcgcgggcccggcggacagcggcgacgccctgctggagcgcaactatcccactggcgcggagttcctcggcgacggcggcgacgtcagcttcagcacccgcggcacgcagaactggacggtggagcggctgctccaggcgcaccgccaactggaggagcgcggctatgtgttcgtcggctaccacggcaccttcctcgaagcggcgcaaagcatcgtcttcggcggggtgcgcgcgcgcagccaggacctcgacgcgatctggcgcggtttctatatcgccggcgatccggcgctggcctacggctacgcccaggaccaggaacccgacgcgcgcggccggatccgcaacggtgccctgctgcgggtctatgtgccgcgctggagtctgccgggcttctaccgcaccggcctgaccctggccgcgccggaggcggcgggcgaggtcgaacggctgatcggccatccgctgccgctgcgcctggacgccatcaccggccccgaggaggaaggcgggcgcgtgaccattctcggctggccgctggccgagcgcaccgtggtgattccctcggcgatccccaccgacccgcgcaacgtcggcggcgacctcgacccgtccagcatccccgacaaggaacaggcgatcagcgccctgccggactacgccagccagcccggcaaaccgccgcgcgaggacttgaagcaccaccaccaccaccactga

SEQ ID NO: 75 - protein, 665 aa, Artificial Sequence
  source: /note="Description of Artificial Sequence: Synthetic polypeptide"
MKKIWLALAGLVLAFSASAAEEAFDLWNECAKACVLDLKDGVRSSRMSVDPAIADTNGQGVLHYSMVLEGGNDALKLAIDNALSITSDGLTIRLEGGVEPNKPVRYSYTRQARGSWSLNWLVPIGHEKPSNIKVFIHELNAGNQLSHMSPIYTIEMGDELLAKLARDATFFVRAHESNEMQPTLAISHAGVSVVMAQAQPRREKRWSEWASGKVLCLLDPLDGVYNYLAQQRCNLDDTWEGKIYRVLAGNPAKHDLDIKPTVISHRLHFPEGGSLAALTAHQACHLPLEAFTSAVTEYYLNHGEWPGNNTSAGVATSSEIKHRQPRGWEQLEQCGYPVQRLVALYLAARLSWNQVDQVIRNALASPGSGGDLGEAIREQPEQARLALTLAAAESERFVRQGTGNDEAGAASADVVSLTCPVAAGECAGPADSGDALLERNYPTGAEFLGDGGDVSFSTRGTQNWTVERLLQAHRQLEERGYVFVGYHGTFLEAAQSIVFGGVRARSQDLDAIWRGFYIAGDPALAYGYAQDQEPDARGRIRNGALLRVYVPRWSLPGFYRTGLTLAAPEAAGEVERLIGHPLPLRLDAITGPEEEGGRVTILGWPLAERTVVIPSAIPTDPRNVGGDLDPSSIPDKEQAISALPDYASQPGKPPREDLKHHHHHH

SEQ ID NO: 76 - DNA, 1998 bp, Artificial Sequence
  source: /note="Description of Artificial Sequence: Synthetic polynucleotide"
atgaaaaagatttggctggcgctggctggtttagttttagcgtttagcgctagcgccgccgaggaagccttcgacctctggaacgaatgcgccaaggcctgcgtgctcgacctcaaggacggcgtgcgttccagccgcatgagcgtcgacccggccatcgccgacaccaacggccagggcgtgctgcactactccatggtcctggagggcggcaacgacgcgctcaagctggccatcgacaacgccctcagcatcaccagcgacggcctgaccatccgcctcgaaggcggcgtcgagccgaacaagccggtgcgctacagctacacgcgccaggcgcgcggcagttggtcgctgaactggctggtaccgatcggccacgagaagccctcgaacatcaaggtgttcatccacgaactgaacgccggtaaccagctcagccacatgtcgccgatctacaccatcgagatgggcgacgagttgctggcgaagctggcgcgcgatgccaccttcttcgtcagggcgcacgagagcaacgagatgcagccgacgctcgccatcagccatgccggggtcagcgtggtcatggctcaggcccagccgcgccgggaaaagcgctggagcgaatgggccagcggcaaggtgttgtgcctgctcgacccgctggacggggtctacaactacctcgcccagcagcgctgcaacctcgacgatacctgggaaggcaagatctaccgggtgctcgccggcaacccggcgaagcatgacctggacatcaagcccacggtcatcagtcatcgcctgcatttccccgagggcggcagcctggccgcgctgaccgcgcaccaggcctgccacctgccgctggaggccttcactcgtcatcgccagccgcgcggctgggaacaactggagcagtgcggctatccggtgcagcggctggtcgccctctacctggcgagcgcggtgaccgagtactatctgaaccacggtgaatggccgggcaacaacaccagcgcgggtgttgcgaccagcagcgagatcaagcgactgtcgtggaaccaggtcgaccaggtgatccgcaacgccctggccagccccggcagcggcggcgacctgggcgaagcgatccgcgagcagccggagcaggcccgtctggccctgaccctggccgccgccgagagcgagcgcttcgtccggcagggcaccggcaacgacgaggccggcgcggccagcgccgacgtggtgagcctgacctgcccggtcgccgccggtgaatgcgcgggcccggcggacagcggcgacgccctgctggagcgcaactatcccactggcgcggagttcctcggcgacggcggcgacgtcagcttcagcacccgcggcacgcagaactggacggtggagcggctgctccaggcgcaccgccaactggaggagcgcggctatgtgttcgtcggctaccacggcaccttcctcgaagcggcgcaaagcatcgtcttcggcggggtgcgcgcgcgcagccaggacctcgacgcgatctggcgcggtttctatatcgccggcgatccggcgctggcctacggctacgcccaggaccaggaacccgacgcgcgcggccggatccgcaacggtgccctgctgcgggtctatgtgccgcgctggagtctgccgggcttctaccgcaccggcctgaccctggccgcgccggaggcggcgggcgaggtcgaacggctgatcggccatccgctgccgctgcgcctggacgccatcaccggccccgaggaggaaggcgggcgcgtgaccattctcggctggccgctggccgagcgcaccgtggtgattccctcggcgatccccaccgacccgcgcaacgtcggcggcgacctcgacccgtccagcatccccgacaaggaacaggcgatcagcgccctgccggactacgccagccagcccggcaaaccgccgcgcgaggacttgaagcaccaccaccaccaccactga

SEQ ID NO: 77 - protein, 665 aa, Artificial Sequence
  source: /note="Description of Artificial Sequence: Synthetic polypeptide"
MKKIWLALAGLVLAFSASAAEEAFDLWNECAKACVLDLKDGVRSSRMSVDPAIADTNGQGVLHYSMVLEGGNDALKLAIDNALSITSDGLTIRLEGGVEPNKPVRYSYTRQARGSWSLNWLVPIGHEKPSNIKVFIHELNAGNQLSHMSPIYTIEMGDELLAKLARDATFFVRAHESNEMQPTLAISHAGVSVVMAQAQPRREKRWSEWASGKVLCLLDPLDGVYNYLAQQRCNLDDTWEGKIYRVLAGNPAKHDLDIKPTVISHRLHFPEGGSLAALTAHQACHLPLEAFTRHRQPRGWEQLEQCGYPVQRLVALYLASAVTEYYLNHGEWPGNNTSAGVATSSEIKRLSWNQVDQVIRNALASPGSGGDLGEAIREQPEQARLALTLAAAESERFVRQGTGNDEAGAASADVVSLTCPVAAGECAGPADSGDALLERNYPTGAEFLGDGGDVSFSTRGTQNWTVERLLQAHRQLEERGYVFVGYHGTFLEAAQSIVFGGVRARSQDLDAIWRGFYIAGDPALAYGYAQDQEPDARGRIRNGALLRVYVPRWSLPGFYRTGLTLAAPEAAGEVERLIGHPLPLRLDAITGPEEEGGRVTILGWPLAERTVVIPSAIPTDPRNVGGDLDPSSIPDKEQAISALPDYASQPGKPPREDLKHHHHHH

SEQ ID NO: 78 - DNA, 1998 bp, Artificial Sequence
  source: /note="Description of Artificial Sequence: Synthetic polynucleotide"
atgaaaaagatttggctggcgctggctggtttagttttagcgtttagcgctagcgccgccgaggaagccttcgacctctggaacgaatgcgccaaggcctgcgtgctcgacctcaaggacggcgtgcgttccagccgcatgagcgtcgacccggccatcgccgacaccaacggccagggcgtgctgcactactccatggtcctggagggcggcaacgacgcgctcaagctggccatcgacaacgccctcagcatcaccagcgacggcctgaccatccgcctcgaaggcggcgtcgagccgaacaagccggtgcgctacagctacacgcgccaggcgcgcggcagttggtcgctgaactggctggtaccgatcggccacgagaagccctcgaacatcaaggtgttcatccacgaactgaacgccggtaaccagctcagccacatgtcgccgatctacaccatcgagatgggcgacgagttgctggcgaagctggcgcgcgatgccaccttcttcgtcagggcgcacgagagcaacgagatgcagccgacgctcgccatcagccatgccggggtcagcgtggtcatggctcaggcccagccgcgccgggaaaagcgctggagcgaatgggccagcggcaaggtgttgtgcctgctcgacccgctggacggggtctacaactacctcgcccagcagcgctgcaacctcgacgatacctgggaaggcaagatctaccgggtgctcgccggcaacccggcgaagcatgacctggacatcaagcccacggtcatcagtcatcgcctgcatttccccgagggcggcagcctggccgcgctgaccgcgcaccaggcctgccacctgccgctggaggccttcactcgtcatcgccagccgcgcggctgggaacaactggagcagtgcggctatccggtgcagcggctggtcgccctctacctggcggcgcgactgtcgtggaacagcgcggtgaccgagtactatctgaaccacggtgaatggccgggcaacaacaccagcgcgggtgttgcgaccagcagcgagatcaaggtcgaccaggtgatccgcaacgccctggccagccccggcagcggcggcgacctgggcgaagcgatccgcgagcagccggagcaggcccgtctggccctgaccctggccgccgccgagagcgagcgcttcgtccggcagggcaccggcaacgacgaggccggcgcggccagcgccgacgtggtgagcctgacctgcccggtcgccgccggtgaatgcgcgggcccggcggacagcggcgacgccctgctggagcgcaactatcccactggcgcggagttcctcggcgacggcggcgacgtcagcttcagcacccgcggcacgcagaactggacggtggagcggctgctccaggcgcaccgccaactggaggagcgcggctatgtgttcgtcggctaccacggcaccttcctcgaagcggcgcaaagcatcgtcttcggcggggtgcgcgcgcgcagccaggacctcgacgcgatctggcgcggtttctatatcgccggcgatccggcgctggcctacggctacgcccaggaccaggaacccgacgcgcgcggccggatccgcaacggtgccctgctgcgggtctatgtgccgcgctggagtctgccgggcttctaccgcaccggcctgaccctggccgcgccggaggcggcgggcgaggtcgaacggctgatcggccatccgctgccgctgcgcctggacgccatcaccggccccgaggaggaaggcgggcgcgtgaccattctcggctggccgctggccgagcgcaccgtggtgattccctcggcgatccccaccgacccgcgcaacgtcggcggcgacctcgacccgtccagcatccccgacaaggaacaggcgatcagcgccctgccggactacgccagccagcccggcaaaccgccgcgcgaggacttgaagcaccaccaccaccaccactga

SEQ ID NO: 79 - protein, 665 aa, Artificial Sequence
  source: /note="Description of Artificial Sequence: Synthetic polypeptide"
MKKIWLALAGLVLAFSASAAEEAFDLWNECAKACVLDLKDGVRSSRMSVDPAIADTNGQGVLHYSMVLEGGNDALKLAIDNALSITSDGLTIRLEGGVEPNKPVRYSYTRQARGSWSLNWLVPIGHEKPSNIKVFIHELNAGNQLSHMSPIYTIEMGDELLAKLARDATFFVRAHESNEMQPTLAISHAGVSVVMAQAQPRREKRWSEWASGKVLCLLDPLDGVYNYLAQQRCNLDDTWEGKIYRVLAGNPAKHDLDIKPTVISHRLHFPEGGSLAALTAHQACHLPLEAFTRHRQPRGWEQLEQCGYPVQRLVALYLAARLSWNSAVTEYYLNHGEWPGNNTSAGVATSSEIKVDQVIRNALASPGSGGDLGEAIREQPEQARLALTLAAAESERFVRQGTGNDEAGAASADVVSLTCPVAAGECAGPADSGDALLERNYPTGAEFLGDGGDVSFSTRGTQNWTVERLLQAHRQLEERGYVFVGYHGTFLEAAQSIVFGGVRARSQDLDAIWRGFYIAGDPALAYGYAQDQEPDARGRIRNGALLRVYVPRWSLPGFYRTGLTLAAPEAAGEVERLIGHPLPLRLDAITGPEEEGGRVTILGWPLAERTVVIPSAIPTDPRNVGGDLDPSSIPDKEQAISALPDYASQPGKPPREDLKHHHHHH

SEQ ID NO: 80 - DNA, 1998 bp, Artificial Sequence
  source: /note="Description of Artificial Sequence: Synthetic polynucleotide"
atgaaaaagatttggctggcgctggctggtttagttttagcgtttagcgctagcgccgccgaggaagccttcgacctctggaacgaatgcgccaaggcctgcgtgctcgacctcaaggacggcgtgcgttccagccgcatgagcgtcgacccggccatcgccgacaccaacggccagggcgtgctgcactactccatggtcctggagggcggcaacgacgcgctcaagctggccatcgacaacgccctcagcatcaccagcgacggcctgaccatccgcctcgaaggcggcgtcgagccgaacaagccggtgcgctacagctacacgcgccaggcgcgcggcagttggtcgctgaactggctggtaccgatcggccacgagaagccctcgaacatcaaggtgttcatccacgaactgaacgccggtaaccagctcagccacatgtcgccgatctacaccatcgagatgggcgacgagttgctggcgaagctggcgcgcgatgccaccttcttcgtcagggcgcacgagagcaacgagatgcagccgacgctcgccatcagccatgccggggtcagcgtggtcatggctcaggcccagccgcgccgggaaaagcgctggagcgaatgggccagcggcaaggtgttgtgcctgctcgacccgctggacggggtctacaactacctcgcccagcagcgctgcaacctcgacgatacctgggaaggcaagatctaccgggtgctcgccggcaacccggcgaagcatgacctggacatcaagcccacggtcatcagtcatcgcctgcatttccccgagggcggcagcctggccgcgctgaccgcgcaccaggcctgccacctgccgctggaggccttcactcgtcatcgccagccgcgcggctgggaacaactggagcagtgcggctatccggtgcagcggctggtcgccctctacctggcggcgcgactgtcgtggaaccaggtcgaccaggtgatccgcaacgccctggccagccccggcagcggcggcgacctgggcgaagcgatccgcgagcagccggagcaggcccgtctggccctgaccctggccgccgccgagagcgagcgcttcgtccggcagggcaccggcaacgacgaggccggcgcggccagcagcgcggtgaccgagtactatctgaaccacggtgaatggccgggcaacaacaccagcgcgggtgttgcgaccagcagcgagatcaaggacgtggtgagcctgacctgcccggtcgccgccggtgaatgcgcgggcccggcggacagcggcgacgccctgctggagcgcaactatcccactggcgcggagttcctcggcgacggcggcgacgtcagcttcagcacccgcggcacgcagaactggacggtggagcggctgctccaggcgcaccgccaactggaggagcgcggctatgtgttcgtcggctaccacggcaccttcctcgaagcggcgcaaagcatcgtcttcggcggggtgcgcgcgcgcagccaggacctcgacgcgatctggcgcggtttctatatcgccggcgatccggcgctggcctacggctacgcccaggaccaggaacccgacgcgcgcggccggatccgcaacggtgccctgctgcgggtctatgtgccgcgctggagtctgccgggcttctaccgcaccggcctgaccctggccgcgccggaggcggcgggcgaggtcgaacggctgatcggccatccgctgccgctgcgcctggacgccatcaccggccccgaggaggaaggcgggcgcgtgaccattctcggctggccgctggccgagcgcaccgtggtgattccctcggcgatccccaccgacccgcgcaacgtcggcggcgacctcgacccgtccagcatccccgacaaggaacaggcgatcagcgccctgccggactacgccagccagcccggcaaaccgccgcgcgaggacttgaagcaccaccaccaccaccactga

SEQ ID NO: 81 - protein, 665 aa, Artificial Sequence
  source: /note="Description of Artificial Sequence: Synthetic polypeptide"
MKKIWLALAGLVLAFSASAAEEAFDLWNECAKACVLDLKDGVRSSRMSVDPAIADTNGQGVLHYSMVLEGGNDALKLAIDNALSITSDGLTIRLEGGVEPNKPVRYSYTRQARGSWSLNWLVPIGHEKPSNIKVFIHELNAGNQLSHMSPIYTIEMGDELLAKLARDATFFVRAHESNEMQPTLAISHAGVSVVMAQAQPRREKRWSEWASGKVLCLLDPLDGVYNYLAQQRCNLDDTWEGKIYRVLAGNPAKHDLDIKPTVISHRLHFPEGGSLAALTAHQACHLPLEAFTRHRQPRGWEQLEQCGYPVQRLVALYLAARLSWNQVDQVIRNALASPGSGGDLGEAIREQPEQARLALTLAAAESERFVRQGTGNDEAGAASSAVTEYYLNHGEWPGNNTSAGVATSSEIKDVVSLTCPVAAGECAGPADSGDALLERNYPTGAEFLGDGGDVSFSTRGTQNWTVERLLQAHRQLEERGYVFVGYHGTFLEAAQSIVFGGVRARSQDLDAIWRGFYIAGDPALAYGYAQDQEPDARGRIRNGALLRVYVPRWSLPGFYRTGLTLAAPEAAGEVERLIGHPLPLRLDAITGPEEEGGRVTILGWPLAERTVVIPSAIPTDPRNVGGDLDPSSIPDKEQAISALPDYASQPGKPPREDLKHHHHHH

SEQ ID NO: 82 - DNA, 1998 bp, Artificial Sequence
  source: /note="Description of Artificial Sequence: Synthetic polynucleotide"
atgaaaaagatttggctggcgctggctggtttagttttagcgtttagcgctagcgccgccgaggaagccttcgacctctggaacgaatgcgccaaggcctgcgtgctcgacctcaaggacggcgtgcgttccagccgcatgagcgtcgacccggccatcgccgacaccaacggccagggcgtgctgcactactccatggtcctggagggcggcaacgacgcgctcaagctggccatcgacaacgccctcagcatcaccagcgacggcctgaccatccgcctcgaaggcggcgtcgagccgaacaagccggtgcgctacagctacacgcgccaggcgcgcggcagttggtcgctgaactggctggtaccgatcggccacgagaagccctcgaacatcaaggtgttcatccacgaactgaacgccggtaaccagctcagccacatgtcgccgatctacaccatcgagatgggcgacgagttgctggcgaagctggcgcgcgatgccaccttcttcgtcagggcgcacgagagcaacgagatgcagccgacgctcgccatcagccatgccggggtcagcgtggtcatggctcaggcccagccgcgccgggaaaagcgctggagcgaatgggccagcggcaaggtgttgtgcctgctcgacccgctggacggggtctacaactacctcgcccagcagcgctgcaacctcgacgatacctgggaaggcaagatctaccgggtgctcgccggcaacccggcgaagcatgacctggacatcaagcccacggtcatcagtcatcgcctgcatttccccgagggcggcagcctggccgcgctgaccgcgcaccaggcctgccacctgccgctggaggccttcactcgtcatcgccagccgcgcggctgggaacaactggagcagtgcggctatccggtgcagcggctggtcgccctctacctggcggcgcgactgtcgtggaaccaggtcgaccaggtgatccgcaacgccctggccagccccggcagcggcggcgacctgggcgaagcgatccgcgagcagccggagcaggcccgtctggccctgaccctggccgccgccgagagcgagcgcttcgtccggcagggcaccggcaacgacgaggccggcgcggccagcgccgacgtggtgagcctgacctgcccggtcgccgccggtgaatgcgcgggcccggcggacagcggcgacgccctgctggagcgcaactatcccactggcgcggagttcctcggcgacggcggcgacgtcagcgcggtgaccgagtactatctgaaccacggtgaatggccgggcaacaacaccagcgcgggtgttgcgaccagcagcgagatcaagttcagcacccgcggcacgcagaactggacggtggagcggctgctccaggcgcaccgccaactggaggagcgcggctatgtgttcgtcggctaccacggcaccttcctcgaagcggcgcaaagcatcgtcttcggcggggtgcgcgcgcgcagccaggacctcgacgcgatctggcgcggtttctatatcgccggcgatccggcgctggcctacggctacgcccaggaccaggaacccgacgcgcgcggccggatccgcaacggtgccctgctgcgggtctatgtgccgcgctggagtctgccgggcttctaccgcaccggcctgaccctggccgcgccggaggcggcgggcgaggtcgaacggctgatcggccatccgctgccgctgcgcctggacgccatcaccggccccgaggaggaaggcgggcgcgtgaccattctcggctggccgctggccgagcgcaccgtggtgattccctcggcgatccccaccgacccgcgcaacgtcggcggcgacctcgacccgtccagcatccccgacaaggaacaggcgatcagcgccctgccggactacgccagccagcccggcaaaccgccgcgcgaggacttgaagcaccaccaccaccaccactga

SEQ ID NO: 83 - protein, 665 aa, Artificial Sequence
  source: /note="Description of Artificial Sequence: Synthetic polypeptide"
MKKIWLALAGLVLAFSASAAEEAFDLWNECAKACVLDLKDGVRSSRMSVDPAIADTNGQGVLHYSMVLEGGNDALKLAIDNALSITSDGLTIRLEGGVEPNKPVRYSYTRQARGSWSLNWLVPIGHEKPSNIKVFIHELNAGNQLSHMSPIYTIEMGDELLAKLARDATFFVRAHESNEMQPTLAISHAGVSVVMAQAQPRREKRWSEWASGKVLCLLDPLDGVYNYLAQQRCNLDDTWEGKIYRVLAGNPAKHDLDIKPTVISHRLHFPEGGSLAALTAHQACHLPLEAFTRHRQPRGWEQLEQCGYPVQRLVALYLAARLSWNQVDQVIRNALASPGSGGDLGEAIREQPEQARLALTLAAAESERFVRQGTGNDEAGAASADVVSLTCPVAAGECAGPADSGDALLERNYPTGAEFLGDGGDVSAVTEYYLNHGEWPGNNTSAGVATSSEIKFSTRGTQNWTVERLLQAHRQLEERGYVFVGYHGTFLEAAQSIVFGGVRARSQDLDAIWRGFYIAGDPALAYGYAQDQEPDARGRIRNGALLRVYVPRWSLPGFYRTGLTLAAPEAAGEVERLIGHPLPLRLDAITGPEEEGGRVTILGWPLAERTVVIPSAIPTDPRNVGGDLDPSSIPDKEQAISALPDYASQPGKPPREDLKHHHHHH

SEQ ID NO: 84 - DNA, 1998 bp, Artificial Sequence
  source: /note="Description of Artificial Sequence: Synthetic polynucleotide"
atgaaaaagatttggctggcgctggctggtttagttttagcgtttagcgctagcgccgccgaggaagccttcgacctctggaacgaatgcgccaaggcctgcgtgctcgacctcaaggacggcgtgcgttccagccgcatgagcgtcgacccggccatcgccgacaccaacggccagggcgtgctgcactactccatggtcctggagggcggcaacgacgcgctcaagctggccatcgacaacgccctcagcatcaccagcgacggcctgaccatccgcctcgaaggcggcgtcgagccgaacaagccggtgcgctacagctacacgcgccaggcgcgcggcagttggtcgctgaactggctggtaccgatcggccacgagaagccctcgaacatcaaggtgttcatccacgaactgaacgccggtaaccagctcagccacatgtcgccgatctacaccatcgagatgggcgacgagttgctggcgaagctggcgcgcgatgccaccttcttcgtcagggcgcacgagagcaacgagatgcagccgacgctcgccatcagccatgccggggtcagcgtggtcatggctcaggcccagccgcgccgggaaaagcgctggagcgaatgggccagcggcaaggtgttgtgcctgctcgacccgctggacggggtctacaactacctcgcccagcagcgctgcaacctcgacgatacctgggaaggcaagatctaccgggtgctcgccggcaacccggcgaagcatgacctggacatcaagcccacggtcatcagtcatcgcctgcatttccccgagggcggcagcctggccgcgctgaccgcgcaccaggcctgccacctgccgctggaggccttcactcgtcatcgccagccgcgcggctgggaacaactggagcagtgcggctatccggtgcagcggctggtcgccctctacctggcggcgcgactgtcgtggaaccaggtcgaccaggtgatccgcaacgccctggccagccccggcagcggcggcgacctgggcgaagcgatccgcgagcagccggagcaggcccgtctggccctgaccctggccgccgccgagagcgagcgcttcgtccggcagggcaccggcaacgacgaggccggcgcggccagcgccgacgtggtgagcctgacctgcccggtcgccgccggtgaatgcgcgggcccggcggacagcggcgacgccctgctggagcgcaactatcccactggcgcggagttcctcggcgacggcggcgacgtcagcttcagcacccgcggcacgcagaactggagcgcggtgaccgagtactatctgaaccacggtgaatggccgggcaacaacaccagcgcgggtgttgcgaccagcagcgagatcaaggtggagcggctgctccaggcgcaccgccaactggaggagcgcggctatgtgttcgtcggctaccacggcaccttcctcgaagcggcgcaaagcatcgtcttcggcggggtgcgcgcgcgcagccaggacctcgacgcgatctggcgcggtttctatatcgccggcgatccggcgctggcctacggctacgcccaggaccaggaacccgacgcgcgcggccggatccgcaacggtgccctgctgcgggtctatgtgccgcgctggagtctgccgggcttctaccgcaccggcctgaccctggccgcgccggaggcggcgggcgaggtcgaacggctgatcggccatccgctgccgctgcgcctggacgccatcaccggccccgaggaggaaggcgggcgcgtgaccattctcggctggccgctggccgagcgcaccgtggtgattccctcggcgatccccaccgacccgcgcaacgtcggcggcgacctcgacccgtccagcatccccgacaaggaacaggcgatcagcgccctgccggactacgccagccagcccggcaaaccgccgcgcgaggacttgaagcaccaccaccaccaccactga

SEQ ID NO: 85 - protein, 665 aa, Artificial Sequence
  source: /note="Description of Artificial Sequence: Synthetic polypeptide"
MKKIWLALAGLVLAFSASAAEEAFDLWNECAKACVLDLKDGVRSSRMSVDPAIADTNGQGVLHYSMVLEGGNDALKLAIDNALSITSDGLTIRLEGGVEPNKPVRYSYTRQARGSWSLNWLVPIGHEKPSNIKVFIHELNAGNQLSHMSPIYTIEMGDELLAKLARDATFFVRAHESNEMQPTLAISHAGVSVVMAQAQPRREKRWSEWASGKVLCLLDPLDGVYNYLAQQRCNLDDTWEGKIYRVLAGNPAKHDLDIKPTVISHRLHFPEGGSLAALTAHQACHLPLEAFTRHRQPRGWEQLEQCGYPVQRLVALYLAARLSWNQVDQVIRNALASPGSGGDLGEAIREQPEQARLALTLAAAESERFVRQGTGNDEAGAASADVVSLTCPVAAGECAGPADSGDALLERNYPTGAEFLGDGGDVSFSTRGTQNWSAVTEYYLNHGEWPGNNTSAGVATSSEIKVERLLQAHRQLEERGYVFVGYHGTFLEAAQSIVFGGVRARSQDLDAIWRGFYIAGDPALAYGYAQDQEPDARGRIRNGALLRVYVPRWSLPGFYRTGLTLAAPEAAGEVERLIGHPLPLRLDAITGPEEEGGRVTILGWPLAERTVVIPSAIPTDPRNVGGDLDPSSIPDKEQAISALPDYASQPGKPPREDLKHHHHHH

SEQ ID NO: 86 - DNA, 1998 bp, Artificial Sequence
  source: /note="Description of Artificial Sequence: Synthetic polynucleotide"
atgaaaaagatttggctggcgctggctggtttagttttagcgtttagcgctagcgccgccgaggaagccttcgacctctggaacgaatgcgccaaggcctgcgtgctcgacctcaaggacggcgtgcgttccagccgcatgagcgtcgacccggccatcgccgacaccaacggccagggcgtgctgcactactccatggtcctggagggcggcaacgacgcgctcaagctggccatcgacaacgccctcagcatcaccagcgacggcctgaccatccgcctcgaaggcggcgtcgagccgaacaagccggtgcgctacagctacacgcgccaggcgcgcggcagttggtcgctgaactggctggtaccgatcggccacgagaagccctcgaacatcaaggtgttcatccacgaactgaacgccggtaaccagctcagccacatgtcgccgatctacaccatcgagatgggcgacgagttgctggcgaagctggcgcgcgatgccaccttcttcgtcagggcgcacgagagcaacgagatgcagccgacgctcgccatcagccatgccggggtcagcgtggtcatggctcaggcccagccgcgccgggaaaagcgctggagcgaatgggccagcggcaaggtgttgtgcctgctcgacccgctggacggggtctacaactacctcgcccagcagcgctgcaacctcgacgatacctgggaaggcaagatctaccgggtgctcgccggcaacccggcgaagcatgacctggacatcaagcccacggtcatcagtcatcgcctgcatttccccgagggcggcagcctggccgcgctgaccgcgcaccaggcctgccacctgccgctggaggccttcactcgtcatcgccagccgcgcggctgggaacaactggagcagtgcggctatccggtgcagcggctggtcgccctctacctggcggcgcgactgtcgtggaaccaggtcgaccaggtgatccgcaacgccctggccagccccggcagcggcggcgacctgggcgaagcgatccgcgagcagccggagcaggcccgtctggccctgaccctggccgccgccgagagcgagcgcttcgtccggcagggcaccggcaacgacgaggccggcgcggccagcgccgacgtggtgagcctgacctgcccggtcgccgccggtgaatgcgcgggcccggcggacagcggcgacgccctgctggagcgcaactatcccactggcgcggagttcctcggcgacggcggcgacgtcagcttcagcacccgcggcacgcagaactggacggtggagcggctgctccaggcgcaccgccaactggaggagcgcggctatgtgttcgtcggctaccacggcaccttcctcgaagcggcgcaaagcatcgtcttcggcggggtgcgcgcgcgcagccaggacctcgacagcgcggtgaccgagtactatctgaaccacggtgaatggccgggcaacaacaccagcgcgggtgttgcgaccagcagcgagatcaagatctggcgcggtttctatatcgccggcgatccggcgctggcctacggctacgcccaggaccaggaacccgacgcgcgcggccggatccgcaacggtgccctgctgcgggtctatgtgccgcgctggagtctgccgggcttctaccgcaccggcctgaccctggccgcgccggaggcggcgggcgaggtcgaacggctgatcggccatccgctgccgctgcgcctggacgccatcaccggccccgaggaggaaggcgggcgcgtgaccattctcggctggccgctggccgagcgcaccgtggtgattccctcggcgatccccaccgacccgcgcaacgtcggcggcgacctcgacccgtccagcatccccgacaaggaacaggcgatcagcgccctgccggactacgccagccagcccggcaaaccgccgcgcgaggacttgaagcaccaccaccaccaccactga

SEQ ID NO: 87 - protein, 665 aa, Artificial Sequence
  source: /note="Description of Artificial Sequence: Synthetic polypeptide"
MKKIWLALAGLVLAFSASAAEEAFDLWNECAKACVLDLKDGVRSSRMSVDPAIADTNGQGVLHYSMVLEGGNDALKLAIDNALSITSDGLTIRLEGGVEPNKPVRYSYTRQARGSWSLNWLVPIGHEKPSNIKVFIHELNAGNQLSHMSPIYTIEMGDELLAKLARDATFFVRAHESNEMQPTLAISHAGVSVVMAQAQPRREKRWSEWASGKVLCLLDPLDGVYNYLAQQRCNLDDTWEGKIYRVLAGNPAKHDLDIKPTVISHRLHFPEGGSLAALTAHQACHLPLEAFTRHRQPRGWEQLEQCGYPVQRLVALYLAARLSWNQVDQVIRNALASPGSGGDLGEAIREQPEQARLALTLAAAESERFVRQGTGNDEAGAASADVVSLTCPVAAGECAGPADSGDALLERNYPTGAEFLGDGGDVSFSTRGTQNWTVERLLQAHRQLEERGYVFVGYHGTFLEAAQSIVFGGVRARSQDLDSAVTEYYLNHGEWPGNNTSAGVATSSEIKIWRGFYIAGDPALAYGYAQDQEPDARGRIRNGALLRVYVPRWSLPGFYRTGLTLAAPEAAGEVERLIGHPLPLRLDAITGPEEEGGRVTILGWPLAERTVVIPSAIPTDPRNVGGDLDPSSIPDKEQAISALPDYASQPGKPPREDLKHHHHHH

SEQ ID NO: 88 - DNA, 1998 bp, Artificial Sequence
  source: /note="Description of Artificial Sequence: Synthetic polynucleotide"
atgaaaaagatttggctggcgctggctggtttagttttagcgtttagcgctagcgccgccgaggaagccttcgacctctggaacgaatgcgccaaggcctgcgtgctcgacctcaaggacggcgtgcgttccagccgcatgagcgtcgacccggccatcgccgacaccaacggccagggcgtgctgcactactccatggtcctggagggcggcaacgacgcgctcaagctggccatcgacaacgccctcagcatcaccagcgacggcctgaccatccgcctcgaaggcggcgtcgagccgaacaagccggtgcgctacagctacacgcgccaggcgcgcggcagttggtcgctgaactggctggtaccgatcggccacgagaagccctcgaacatcaaggtgttcatccacgaactgaacgccggtaaccagctcagccacatgtcgccgatctacaccatcgagatgggcgacgagttgctggcgaagctggcgcgcgatgccaccttcttcgtcagggcgcacgagagcaacgagatgcagccgacgctcgccatcagccatgccggggtcagcgtggtcatggctcaggcccagccgcgccgggaaaagcgctggagcgaatgggccagcggcaaggtgttgtgcctgctcgacccgctggacggggtctacaactacctcgcccagcagcgctgcaacctcgacgatacctgggaaggcaagatctaccgggtgctcgccggcaacccggcgaagcatgacctggacatcaagcccacggtcatcagtcatcgcctgcatttccccgagggcggcagcctggccgcgctgaccgcgcaccaggcctgccacctgccgctggaggccttcactcgtcatcgccagccgcgcggctgggaacaactggagcagtgcggctatccggtgcagcggctggtcgccctctacctggcggcgcgactgtcgtggaaccaggtcgaccaggtgatccgcaacgccctggccagccccggcagcggcggcgacctgggcgaagcgatccgcgagcagccggagcaggcccgtctggccctgaccctggccgccgccgagagcgagcgcttcgtccggcagggcaccggcaacgacgaggccggcgcggccagcgccgacgtggtgagcctgacctgcccggtcgccgccggtgaatgcgcgggcccggcggacagcggcgacgccctgctggagcgcaactatcccactggcgcggagttcctcggcgacggcggcgacgtcagcttcagcacccgcggcacgcagaactggacggtggagcggctgctccaggcgcaccgccaactggaggagcgcggctatgtgttcgtcggctaccacggcaccttcctcgaagcggcgcaaagcatcgtcttcggcggggtgcgcgcgcgcagccaggacctcgacgcgatctggcgcggtttctatatcgccggcgatccggcgctggcctacggctacgcccaggaccaggaacccgacgcgcgcggccggatccgcaacggtgccctgctgcgggtctatgtgccgcgctggagtctgccgggcttctaccgcaccggcctgaccctgagcgcggtgaccgagtactatctgaaccacggtgaatggccgggcaacaacaccagcgcgggtgttgcgaccagcagcgagatcaaggcgccggaggcggcgggcgaggtcgaacggctgatcggccatccgctgccgctgcgcctggacgccatcaccggccccgaggaggaaggcgggcgcgtgaccattctcggctggccgctggccgagcgcaccgtggtgattccctcggcgatccccaccgacccgcgcaacgtcggcggcgacctcgacccgtccagcatccccgacaaggaacaggcgatcagcgccctgccggactacgccagccagcccggcaaaccgccgcgcgaggacttgaagcaccaccaccaccaccactga

SEQ ID NO: 89 - protein, 665 aa, Artificial Sequence
  source: /note="Description of Artificial Sequence: Synthetic polypeptide"
MKKIWLALAGLVLAFSASAAEEAFDLWNECAKACVLDLKDGVRSSRMSVDPAIADTNGQGVLHYSMVLEGGNDALKLAIDNALSITSDGLTIRLEGGVEPNKPVRYSYTRQARGSWSLNWLVPIGHEKPSNIKVFIHELNAGNQLSHMSPIYTIEMGDELLAKLARDATFFVRAHESNEMQPTLAISHAGVSVVMAQAQPRREKRWSEWASGKVLCLLDPLDGVYNYLAQQRCNLDDTWEGKIYRVLAGNPAKHDLDIKPTVISHRLHFPEGGSLAALTAHQACHLPLEAFTRHRQPRGWEQLEQCGYPVQRLVALYLAARLSWNQVDQVIRNALASPGSGGDLGEAIREQPEQARLALTLAAAESERFVRQGTGNDEAGAASADVVSLTCPVAAGECAGPADSGDALLERNYPTGAEFLGDGGDVSFSTRGTQNWTVERLLQAHRQLEERGYVFVGYHGTFLEAAQSIVFGGVRARSQDLDAIWRGFYIAGDPALAYGYAQDQEPDARGRIRNGALLRVYVPRWSLPGFYRTGLTLSAVTEYYLNHGEWPGNNTSAGVATSSEIKAPEAAGEVERLIGHPLPLRLDAITGPEEEGGRVTILGWPLAERTVVIPSAIPTDPRNVGGDLDPSSIPDKEQAISALPDYASQPGKPPREDLKHHHHHH

SEQ ID NO: 90 - DNA, 1998 bp, Artificial Sequence
  source: /note="Description of Artificial Sequence: Synthetic polynucleotide"
atgaaaaagatttggctggcgctggctggtttagttttagcgtttagcgctagcgccgccgaggaagccttcgacctctggaacgaatgcgccaaggcctgcgtgctcgacctcaaggacggcgtgcgttccagccgcatgagcgtcgacccggccatcgccgacaccaacggccagggcgtgctgcactactccatggtcctggagggcggcaacgacgcgctcaagctggccatcgacaacgccctcagcatcaccagcgacggcctgaccatccgcctcgaaggcggcgtcgagccgaacaagccggtgcgctacagctacacgcgccaggcgcgcggcagttggtcgctgaactggctggtaccgatcggccacgagaagccctcgaacatcaaggtgttcatccacgaactgaacgccggtaaccagctcagccacatgtcgccgatctacaccatcgagatgggcgacgagttgctggcgaagctggcgcgcgatgccaccttcttcgtcagggcgcacgagagcaacgagatgcagccgacgctcgccatcagccatgccggggtcagcgtggtcatggctcaggcccagccgcgccgggaaaagcgctggagcgaatgggccagcggcaaggtgttgtgcctgctcgacccgctggacggggtctacaactacctcgcccagcagcgctgcaacctcgacgatacctgggaaggcaagatctaccgggtgctcgccggcaacccggcgaagcatgacctggacatcaagcccacggtcatcagtcatcgcctgcatttccccgagggcggcagcctggccgcgctgaccgcgcaccaggcctgccacctgccgctggaggccttcactcgtcatcgccagccgcgcggctgggaacaactggagcagtgcggctatccggtgcagcggctggtcgccctctacctggcggcgcgactgtcgtggaaccaggtcgaccaggtgatccgcaacgccctggccagccccggcagcggcggcgacctgggcgaagcgatccgcgagcagccggagcaggcccgtctggccctgaccctggccgccgccgagagcgagcgcttcgtccggcagggcaccggcaacgacgaggccggcgcggccagcgccgacgtggtgagcctgacctgcccggtcgccgccggtgaatgcgcgggcccggcggacagcggcgacgccctgctggagcgcaactatcccactggcgcggagttcctcggcgacggcggcgacgtcagcttcagcacccgcggcacgcagaactggacggtggagcggctgctccaggcgcaccgccaactggaggagcgcggctatgtgttcgtcggctaccacggcaccttcctcgaagcggcgcaaagcatcgtcttcggcggggtgcgcgcgcgcagccaggacctcgacgcgatctggcgcggtttctatatcgccggcgatccggcgctggcctacggctacgcccaggaccaggaacccgacgcgcgcggccggatccgcaacggtgccctgctgcgggtctatgtgccgcgctggagtctgccgggcttctaccgcaccggcctgaccctggccgcgccggaggcggcgagcgcggtgaccgagtactatctgaaccacggtgaatggccgggcaacaacaccagcgcgggtgttgcgaccagcagcgagatcaaggaggtcgaacggctgatcggccatccgctgccgctgcgcctggacgccatcaccggccccgaggaggaaggcgggcgcgtgaccattctcggctggccgctggccgagcgcaccgtggtgattccctcggcgatccccaccgacccgcgcaacgtcggcggcgacctcgacccgtccagcatccccgacaaggaacaggcgatcagcgccctgccggactacgccagccagcccggcaaaccgccgcgcgaggacttgaagcaccaccaccaccaccactga

SEQ ID NO: 91 - protein, 665 aa, Artificial Sequence
  source: /note="Description of Artificial Sequence: Synthetic polypeptide"
MKKIWLALAGLVLAFSASAAEEAFDLWNECAKACVLDLKDGVRSSRMSVDPAIADTNGQGVLHYSMVLEGGNDALKLAIDNALSITSDGLTIRLEGGVEPNKPVRYSYTRQARGSWSLNWLVPIGHEKPSNIKVFIHELNAGNQLSHMSPIYTIEMGDELLAKLARDATFFVRAHESNEMQPTLAISHAGVSVVMAQAQPRREKRWSEWASGKVLCLLDPLDGVYNYLAQQRCNLDDTWEGKIYRVLAGNPAKHDLDIKPTVISHRLHFPEGGSLAALTAHQACHLPLEAFTRHRQPRGWEQLEQCGYPVQRLVALYLAARLSWNQVDQVIRNALASPGSGGDLGEAIREQPEQARLALTLAAAESERFVRQGTGNDEAGAASADVVSLTCPVAAGECAGPADSGDALLERNYPTGAEFLGDGGDVSFSTRGTQNWTVERLLQAHRQLEERGYVFVGYHGTFLEAAQSIVFGGVRARSQDLDAIWRGFYIAGDPALAYGYAQDQEPDARGRIRNGALLRVYVPRWSLPGFYRTGLTLAAPEAASAVTEYYLNHGEWPGNNTSAGVATSSEIKEVERLIGHPLPLRLDAITGPEEEGGRVTILGWPLAERTVVIPSAIPTDPRNVGGDLDPSSIPDKEQAISALPDYASQPGKPPREDLKHHHHHH

SEQ ID NO: 92 - DNA, 1998 bp, Artificial Sequence
  source: /note="Description of Artificial Sequence: Synthetic polynucleotide"
atgaaaaagatttggctggcgctggctggtttagttttagcgtttagcgctagcgccgccgaggaagccttcgacctctggaacgaatgcgccaaggcctgcgtgctcgacctcaaggacggcgtgcgttccagccgcatgagcgtcgacccggccatcgccgacaccaacggccagggcgtgctgcactactccatggtcctggagggcggcaacgacgcgctcaagctggccatcgacaacgccctcagcatcaccagcgacggcctgaccatccgcctcgaaggcggcgtcgagccgaacaagccggtgcgctacagctacacgcgccaggcgcgcggcagttggtcgctgaactggctggtaccgatcggccacgagaagccctcgaacatcaaggtgttcatccacgaactgaacgccggtaaccagctcagccacatgtcgccgatctacaccatcgagatgggcgacgagttgctggcgaagctggcgcgcgatgccaccttcttcgtcagggcgcacgagagcaacgagatgcagccgacgctcgccatcagccatgccggggtcagcgtggtcatggctcaggcccagccgcgccgggaaaagcgctggagcgaatgggccagcggcaaggtgttgtgcctgctcgacccgctggacggggtctacaactacctcgcccagcagcgctgcaacctcgacgatacctgggaaggcaagatctaccgggtgctcgccggcaacccggcgaagcatgacctggacatcaagcccacggtcatcagtcatcgcctgcatttccccgagggcggcagcctggccgcgctgaccgcgcaccaggcctgccacctgccgctggaggccttcactcgtcatcgccagccgcgcggctgggaacaactggagcagtgcggctatccggtgcagcggctggtcgccctctacctggcggcgcgactgtcgtggaaccaggtcgaccaggtgatccgcaacgccctggccagccccggcagcggcggcgacctgggcgaagcgatccgcgagcagccggagcaggcccgtctggccctgaccctggccgccgccgagagcgagcgcttcgtccggcagggcaccggcaacgacgaggccggcgcggccagcgccgacgtggtgagcctgacctgcccggtcgccgccggtgaatgcgcgggcccggcggacagcggcgacgccctgctggagcgcaactatcccactggcgcggagttcctcggcgacggcggcgacgtcagcttcagcacccgcggcacgcagaactggacggtggagcggctgctccaggcgcaccgccaactggaggagcgcggctatgtgttcgtcggctaccacggcaccttcctcgaagcggcgcaaagcatcgtcttcggcggggtgcgcgcgcgcagccaggacctcgacgcgatctggcgcggtttctatatcgccggcgatccggcgctggcctacggctacgcccaggaccaggaacccgacgcgcgcggccggatccgcaacggtgccctgctgcgggtctatgtgccgcgctggagtctgccgggcttctaccgcaccggcctgaccctggccgcgccggaggcggcgggcgaggtcgaacggctgatcggcagcgcggtgaccgagtactatctgaaccacggtgaatggccgggcaacaacaccagcgcgggtgttgcgaccagcagcgagatcaagccgctgccgctgcgcctggacgccatcaccggccccgaggaggaaggcgggcgcgtgaccattctcggctggccgctggccgagcgcaccgtggtgattccctcggcgatccccaccgacccgcgcaacgtcggcggcgacctcgacccgtccagcatccccgacaaggaacaggcgatcagcgccctgccggactacgccagccagcccggcaaaccgccgcgcgaggacttgaagcaccaccaccaccaccactga

SEQ ID NO: 93 - protein, 665 aa, Artificial Sequence
  source: /note="Description of Artificial Sequence: Synthetic polypeptide"
MKKIWLALAGLVLAFSASAAEEAFDLWNECAKACVLDLKDGVRSSRMSVDPAIADTNGQGVLHYSMVLEGGNDALKLAIDNALSITSDGLTIRLEGGVEPNKPVRYSYTRQARGSWSLNWLVPIGHEKPSNIKVFIHELNAGNQLSHMSPIYTIEMGDELLAKLARDATFFVRAHESNEMQPTLAISHAGVSVVMAQAQPRREKRWSEWASGKVLCLLDPLDGVYNYLAQQRCNLDDTWEGKIYRVLAGNPAKHDLDIKPTVISHRLHFPEGGSLAALTAHQACHLPLEAFTRHRQPRGWEQLEQCGYPVQRLVALYLAARLSWNQVDQVIRNALASPGSGGDLGEAIREQPEQARLALTLAAAESERFVRQGTGNDEAGAASADVVSLTCPVAAGECAGPADSGDALLERNYPTGAEFLGDGGDVSFSTRGTQNWTVERLLQAHRQLEERGYVFVGYHGTFLEAAQSIVFGGVRARSQDLDAIWRGFYIAGDPALAYGYAQDQEPDARGRIRNGALLRVYVPRWSLPGFYRTGLTLAAPEAAGEVERLIGSAVTEYYLNHGEWPGNNTSAGVATSSEIKPLPLRLDAITGPEEEGGRVTILGWPLAERTVVIPSAIPTDPRNVGGDLDPSSIPDKEQAISALPDYASQPGKPPREDLKHHHHHH

SEQ ID NO: 94 - DNA, 1998 bp, Artificial Sequence
  source: /note="Description of Artificial Sequence: Synthetic polynucleotide"
atgaaaaagatttggctggcgctggctggtttagttttagcgtttagcgctagcgccgccgaggaagccttcgacctctggaacgaatgcgccaaggcctgcgtgctcgacctcaaggacggcgtgcgttccagccgcatgagcgtcgacccggccatcgccgacaccaacggccagggcgtgctgcactactccatggtcctggagggcggcaacgacgcgctcaagctggccatcgacaacgccctcagcatcaccagcgacggcctgaccatccgcctcgaaggcggcgtcgagccgaacaagccggtgcgctacagctacacgcgccaggcgcgcggcagttggtcgctgaactggctggtaccgatcggccacgagaagccctcgaacatcaaggtgttcatccacgaactgaacgccggtaaccagctcagccacatgtcgccgatctacaccatcgagatgggcgacgagttgctggcgaagctggcgcgcgatgccaccttcttcgtcagggcgcacgagagcaacgagatgcagccgacgctcgccatcagccatgccggggtcagcgtggtcatggctcaggcccagccgcgccgggaaaagcgctggagcgaatgggccagcggcaaggtgttgtgcctgctcgacccgctggacggggtctacaactacctcgcccagcagcgctgcaacctcgacgatacctgggaaggcaagatctaccgggtgctcgccggcaacccggcgaagcatgacctggacatcaagcccacggtcatcagtcatcgcctgcatttccccgagggcggcagcctggccgcgctgaccgcgcaccaggcctgccacctgccgctggaggccttcactcgtcatcgccagccgcgcggctgggaacaactggagcagtgcggctatccggtgcagcggctggtcgccctctacctggcggcgcgactgtcgtggaaccaggtcgaccaggtgatccgcaacgccctggccagccccggcagcggcggcgacctgggcgaagcgatccgcgagcagccggagcaggcccgtctggccctgaccctggccgccgccgagagcgagcgcttcgtccggcagggcaccggcaacgacgaggccggcgcggccagcgccgacgtggtgagcctgacctgcccggtcgccgccggtgaatgcgcgggcccggcggacagcggcgacgccctgctggagcgcaactatcccactggcgcggagttcctcggcgacggcggcgacgtcagcttcagcacccgcggcacgcagaactggacggtggagcggctgctccaggcgcaccgccaactggaggagcgcggctatgtgttcgtcggctaccacggcaccttcctcgaagcggcgcaaagcatcgtcttcggcggggtgcgcgcgcgcagccaggacctcgacgcgatctggcgcggtttctatatcgccggcgatccggcgctggcctacggctacgcccaggaccaggaacccgacgcgcgcggccggatccgcaacggtgccctgctgcgggtctatgtgccgcgctggagtctgccgggcttctaccgcaccggcctgaccctggccgcgccggaggcggcgggcgaggtcgaacggctgatcggccatccgctgccgctgcgcctggacgccatcaccggccccgaggaggaaggcgggcgcgtgaccattctcggctggccgctggccgagcgcaccgtggtgattccctcggcgatccccaccgacccgcgcaacgtcggcggcgacctcgacccgtccagcgcggtgaccgagtactatctgaaccacggtgaatggccgggcaacaacaccagcgcgggtgttgcgaccagcagcgagatcaagatccccgacaaggaacaggcgatcagcgccctgccggactacgccagccagcccggcaaaccgccgcgcgaggacttgaagcaccaccaccaccaccactga

SEQ ID NO: 95 - protein, 665 aa, Artificial Sequence
  source: /note="Description of Artificial Sequence: Synthetic polypeptide"
MKKIWLALAGLVLAFSASAAEEAFDLWNECAKACVLDLKDGVRSSRMSVDPAIADTNGQGVLHYSMVLEGGNDALKLAIDNALSITSDGLTIRLEGGVEPNKPVRYSYTRQARGSWSLNWLVPIGHEKPSNIKVFIHELNAGNQLSHMSPIYTIEMGDELLAKLARDATFFVRAHESNEMQPTLAISHAGVSVVMAQAQPRREKRWSEWASGKVLCLLDPLDGVYNYLAQQRCNLDDTWEGKIYRVLAGNPAKHDLDIKPTVISHRLHFPEGGSLAALTAHQACHLPLEAFTRHRQPRGWEQLEQCGYPVQRLVALYLAARLSWNQVDQVIRNALASPGSGGDLGEAIREQPEQARLALTLAAAESERFVRQGTGNDEAGAASADVVSLTCPVAAGECAGPADSGDALLERNYPTGAEFLGDGGDVSFSTRGTQNWTVERLLQAHRQLEERGYVFVGYHGTFLEAAQSIVFGGVRARSQDLDAIWRGFYIAGDPALAYGYAQDQEPDARGRIRNGALLRVYVPRWSLPGFYRTGLTLAAPEAAGEVERLIGHPLPLRLDAITGPEEEGGRVTILGWPLAERTVVIPSAIPTDPRNVGGDLDPSSAVTEYYLNHGEWPGNNTSAGVATSSEIKIPDKEQAISALPDYASQPGKPPREDLKHHHHHH

SEQ ID NO: 96 - DNA, 1998 bp, Artificial Sequence
  source: /note="Description of Artificial Sequence: Synthetic polynucleotide"
atgaaaaagatttggctggcgctggctggtttagttttagcgtttagcgctagcgccgccgaggaagccttcgacctctggaacgaatgcgccaaggcctgcgtgctcgacctcaaggacggcgtgcgttccagccgcatgagcgtcgacccggccatcgccgacaccaacggccagggcgtgctgcactactccatggtcctggagggcggcaacgacgcgctcaagctggccatcgacaacgccctcagcatcaccagcgacggcctgaccatccgcctcgaaggcggcgtcgagccgaacaagccggtgcgctacagctacacgcgccaggcgcgcggcagttggtcgctgaactggctggtaccgatcggccacgagaagccctcgaacatcaaggtgttcatccacgaactgaacgccggtaaccagctcagccacatgtcgccgatctacaccatcgagatgggcgacgagttgctggcgaagctggcgcgcgatgccaccttcttcgtcagggcgcacgagagcaacgagatgcagccgacgctcgccatcagccatgccggggtcagcgtggtcatggctcaggcccagccgcgccgggaaaagcgctggagcgaatgggccagcggcaaggtgttgtgcctgctcgacccgctggacggggtctacaactacctcgcccagcagcgctgcaacctcgacgatacctgggaaggcaagatctaccgggtgctcgccggcaacccggcgaagcatgacctggacatctcagccgttaccgagtattacctgaatcacggcgaatggcccggcaacaacacttctgccggcgtggcaacctcctctgaaatcaaacccacggtcatcagtcatcgcctgcatttccccgagggcggcagcctggccgcgctgaccgcgcaccaggcctgccacctgccgctggaggccttcactcgtcatcgccagccgcgcggctgggaacaactggagcagtgcggctatccggtgcagcggctggtcgccctctacctggcggcgcgactgtcgtggaaccaggtcgaccaggtgatccgcaacgccctggccagccccggcagcggcggcgacctgggcgaagcgatccgcgagcagccggagcaggcccgtctggccctgaccctggccgccgccgagagcgagcgcttcgtccggcagggcaccggcaacgacgaggccggcgcggccagcgccgacgtggtgagcctgacctgcccggtcgccgccggtgaatgcgcgggcccggcggacagcggcgacgccctgctggagcgcaactatcccactggcgcggagttcctcggcgacggcggcgacgtcagcttcagcacccgcggcacgcagaactggacggtggagcggctgctccaggcgcaccgccaactggaggagcgcggctatgtgttcgtcggctaccacggcaccttcctcgaagcggcgcaaagcatcgtcttcggcggggtgcgcgcgcgcagccaggacctcgacgcgatctggcgcggtttctatatcgccggcgatccggcgctggcctacggctacgcccaggaccaggaacccgacgcgcgcggccggatccgcaacggtgccctgctgcgggtctatgtgccgcgctggagtctgccgggcttctaccgcaccggcctgaccctggccgcgccggaggcggcgggcgaggtcgaacggctgatcggccatccgctgccgctgcgcctggacgccatcaccggccccgaggaggaaggcgggcgcgtgaccattctcggctggccgctggccgagcgcaccgtggtgattccctcggcgatccccaccgacccgcgcaacgtcggcggcgacctcgacccgtccagcatccccgacaaggaacaggcgatcagcgccctgccggactacgccagccagcccggcaaaccgccgcgcgaggacttgaagcaccaccaccaccaccactga

SEQ ID NO: 97 - protein, 665 aa, Artificial Sequence
  source: /note="Description of Artificial Sequence: Synthetic polypeptide"
MKKIWLALAGLVLAFSASAAEEAFDLWNECAKACVLDLKDGVRSSRMSVDPAIADTNGQGVLHYSMVLEGGNDALKLAIDNALSITSDGLTIRLEGGVEPNKPVRYSYTRQARGSWSLNWLVPIGHEKPSNIKVFIHELNAGNQLSHMSPIYTIEMGDELLAKLARDATFFVRAHESNEMQPTLAISHAGVSVVMAQAQPRREKRWSEWASGKVLCLLDPLDGVYNYLAQQRCNLDDTWEGKIYRVLAGNPAKHDLDISAVTEYYLNHGEWPGNNTSAGVATSSEIKPTVISHRLHFPEGGSLAALTAHQACHLPLEAFTRHRQPRGWEQLEQCGYPVQRLVALYLAARLSWNQVDQVIRNALASPGSGGDLGEAIREQPEQARLALTLAAAESERFVRQGTGNDEAGAASADVVSLTCPVAAGECAGPADSGDALLERNYPTGAEFLGDGGDVSFSTRGTQNWTVERLLQAHRQLEERGYVFVGYHGTFLEAAQSIVFGGVRARSQDLDAIWRGFYIAGDPALAYGYAQDQEPDARGRIRNGALLRVYVPRWSLPGFYRTGLTLAAPEAAGEVERLIGHPLPLRLDAITGPEEEGGRVTILGWPLAERTVVIPSAIPTDPRNVGGDLDPSSIPDKEQAISALPDYASQPGKPPREDLKHHHHHH

SEQ ID NO: 98 - DNA, 1998 bp, Artificial Sequence; identical to SEQ ID NO: 52
  source: /note="Description of Artificial Sequence: Synthetic polynucleotide"

SEQ ID NO: 99 - protein, 665 aa, Artificial Sequence; identical to SEQ ID NO: 53
  source: /note="Description of Artificial Sequence: Synthetic polypeptide"

SEQ ID NO: 100 - DNA, 2007 bp, Artificial Sequence
  source: /note="Description of Artificial Sequence: Synthetic polynucleotide"
atgaaaaaaatctggctggctctggcaggtctggttctggcgttctccgcctctgctagcagtgcggtgaccggctattacctgaatcatggcacctggccgaaagataatacgagcgcgggcgttgccagctctccgacggacattaaagccgaggaagccttcgacctctggaacgaatgcgccaaggcctgcgtgctcgacctcaaggacggcgtgcgttccagccgcatgagcgtcgacccggccatcgccgacaccaacggccagggcgtgctgcactactccatggtcctggagggcggcaacgacgcgctcaagctggccatcgacaacgccctcagcatcaccagcgacggcctgaccatccgcctcgaaggcggcgtcgagccgaacaagccggtgcgctacagctacacgcgccaggcgcgcggcagttggtcgctgaactggctggtaccgatcggccacgagaagccctcgaacatcaaggtgttcatccacgaactgaacgccggtaaccagctcagccacatgtcgccgatctacaccatcgagatgggcgacgagttgctggcgaagctggcgcgcgatgccaccttcttcgtcagggcgcacgagagcaacgagatgcagccgacgctcgccatcagccatgccggggtcagcgtggtcatggctcaggcccagccgcgccgggaaaagcgctggagcgaatgggccagcggcaaggtgttgtgcctgctcgacccgctggacggggtctacaactacctcgcccagcagcgctgcaacctcgacgatacctgggaaggcaagatctaccgggtgctcgccggcaacccggcgaagcatgacctggacatcaagcccacggtcatcagtcatcgcctgcatttccccgagggcggcagcctggccgcgctgaccgcgcaccaggcctgccacctgccgctggaggccttcactcgtcatcgccagccgcgcggctgggaacaactggagcagtgcggctatccggtgcagcggctggtcgccctctacctggcggcgcgactgtcgtggaaccaggtcgaccaggtgatccgcaacgccctggccagccccggcagcggcggcgacctgggcgaagcgatccgcgagcagccggagcaggcccgtctggccctgaccctggccgccgccgagagcgagcgcttcgtccggcagggcaccggcaacgacgaggccggcgcggccagcgccgacgtggtgagcctgacctgcccggtcgccgccggtgaatgcgcgggcccggcggacagcggcgacgccctgctggagcgcaactatcccactggcgcggagttcctcggcgacggcggcgacgtcagcttcagcacccgcggcacgcagaactggacggtggagcggctgctccaggcgcaccgccaactggaggagcgcggctatgtgttcgtcggctaccacggcaccttcctcgaagcggcgcaaagcatcgtcttcggcggggtgcgcgcgcgcagccaggacctcgacgcgatctggcgcggtttctatatcgccggcgatccggcgctggcctacggctacgcccaggaccaggaacccgacgcgcgcggccggatccgcaacggtgccctgctgcgggtctatgtgccgcgctggagtctgccgggcttctaccgcaccggcctgaccctggccgcgccggaggcggcgggcgaggtcgaacggctgatcggccatccgctgccgctgcgcctggacgccatcaccggccccgaggaggaaggcgggcgcgtgaccattctcggctggccgctggccgagcgcaccgtggtgattccctcggcgatccccaccgacccgcgcaacgtcggcggcgacctcgacccgtccagcatccccgacaaggaacaggcgatcagcgccctgccggactacgccagccagcccggcaaaccgccgcgcgaggacttgaagcaccaccaccaccaccactga

SEQ ID NO: 101 - protein, 668 aa, Artificial Sequence
  source: /note="Description of Artificial Sequence: Synthetic polypeptide"
MKKIWLALAGLVLAFSASASSAVTGYYLNHGTWPKDNTSAGVASSPTDIKAEEAFDLWNECAKACVLDLKDGVRSSRMSVDPAIADTNGQGVLHYSMVLEGGNDALKLAIDNALSITSDGLTIRLEGGVEPNKPVRYSYTRQARGSWSLNWLVPIGHEKPSNIKVFIHELNAGNQLSHMSPIYTIEMGDELLAKLARDATFFVRAHESNEMQPTLAISHAGVSVVMAQAQPRREKRWSEWASGKVLCLLDPLDGVYNYLAQQRCNLDDTWEGKIYRVLAGNPAKHDLDIKPTVISHRLHFPEGGSLAALTAHQACHLPLEAFTRHRQPRGWEQLEQCGYPVQRLVALYLAARLSWNQVDQVIRNALASPGSGGDLGEAIREQPEQARLALTLAAAESERFVRQGTGNDEAGAASADVVSLTCPVAAGECAGPADSGDALLERNYPTGAEFLGDGGDVSFSTRGTQNWTVERLLQAHRQLEERGYVFVGYHGTFLEAAQSIVFGGVRARSQDLDAIWRGFYIAGDPALAYGYAQDQEPDARGRIRNGALLRVYVPRWSLPGFYRTGLTLAAPEAAGEVERLIGHPLPLRLDAITGPEEEGGRVTILGWPLAERTVVIPSAIPTDPRNVGGDLDPSSIPDKEQAISALPDYASQPGKPPREDLKHHHHHH

SEQ ID NO: 102 - DNA, 2022 bp, Artificial Sequence
  source: /note="Description of Artificial Sequence: Synthetic polynucleotide"
atgaaaaaaatctggctggctctggcaggtctggttctggcgttctccgcctctgctagcgcggccgtggttgaatattacagtgataacggcacctttccggctcagaatgcaagcgctggcattgcgaccgcctctgcaatcacgggtaaatatgtcgcaaaagccgaggaagccttcgacctctggaacgaatgcgccaaggcctgcgtgctcgacctcaaggacggcgtgcgttccagccgcatgagcgtcgacccggccatcgccgacaccaacggccagggcgtgctgcactactccatggtcctggagggcggcaacgacgcgctcaagctggccatcgacaacgccctcagcatcaccagcgacggcctgaccatccgcctcgaaggcggcgtcgagccgaacaagccggtgcgctacagctacacgcgccaggcgcgcggcagttggtcgctgaactggctggtaccgatcggccacgagaagccctcgaacatcaaggtgttcatccacgaactgaacgccggtaaccagctcagccacatgtcgccgatctacaccatcgagatgggcgacgagttgctggcgaagctggcgcgcgatgccaccttcttcgtcagggcgcacgagagcaacgagatgcagccgacgctcgccatcagccatgccggggtcagcgtggtcatggctcaggcccagccgcgccgggaaaagcgctggagcgaatgggccagcggcaaggtgttgtgcctgctcgacccgctggacggggtctacaactacctcgcccagcagcgctgcaacctcgacgatacctgggaaggcaagatctaccgggtgctcgccggcaacccggcgaagcatgacctggacatcaagcccacggtcatcagtcatcgcctgcatttccccgagggcggcagcctggccgcgctgaccgcgcaccaggcctgccacctgccgctggaggccttcactcgtcatcgccagccgcgcggctgggaacaactggagcagtgcggctatccggtgcagcggctggtcgccctctacctggcggcgcgactgtcgtggaaccaggtcgaccaggtgatccgcaacgccctggccagccccggcagcggcggcgacctgggcgaagcgatccgcgagcagccggagcaggcccgtctggccctgaccctggccgccgccgagagcgagcgcttcgtccggcagggcaccggcaacgacgaggccggcgcggccagcgccgacgtggtgagcctgacctgcccggtcgccgccggtgaatgcgcgggcccggcggacagcggcgacgccctgctggagcgcaactatcccactggcgcggagttcctcggcgacggcggcgacgtcagcttcagcacccgcggcacgcagaactggacggtggagcggctgctccaggcgcaccgccaactggaggagcgcggctatgtgttcgtcggctaccacggcaccttcctcgaagcggcgcaaagcatcgtcttcggcggggtgcgcgcgcgcagccaggacctcgacgcgatctggcgcggtttctatatcgccggcgatccggcgctggcctacggctacgcccaggaccaggaacccgacgcgcgcggccggatccgcaacggtgccctgctgcgggtctatgtgccgcgctggagtctgccgggcttctaccgcaccggcctgaccctggccgcgccggaggcggcgggcgaggtcgaacggctgatcggccatccgctgccgctgcgcctggacgccatcaccggccccgaggaggaaggcgggcgcgtgaccattctcggctggccgctggccgagcgcaccgtggtgattccctcggcgatccccaccgacccgcgcaacgtcggcggcgacctcgacccgtccagcatccccgacaaggaacaggcgatcagcgccctgccggactacgccagccagcccggcaaaccgccgcgcgaggacttgaagcaccaccaccaccaccactga

SEQ ID NO: 103 - protein, 673 aa, Artificial Sequence
  source: /note="Description of Artificial Sequence: Synthetic polypeptide"
MKKIWLALAGLVLAFSASASAAVVEYYSDNGTFPAQNASAGIATASAITGKYVAKAEEAFDLWNECAKACVLDLKDGVRSSRMSVDPAIADTNGQGVLHYSMVLEGGNDALKLAIDNALSITSDGLTIRLEGGVEPNKPVRYSYTRQARGSWSLNWLVPIGHEKPSNIKVFIHELNAGNQLSHMSPIYTIEMGDELLAKLARDATFFVRAHESNEMQPTLAISHAGVSVVMAQAQPRREKRWSEWASGKVLCLLDPLDGVYNYLAQQRCNLDDTWEGKIYRVLAGNPAKHDLDIKPTVISHRLHFPEGGSLAALTAHQACHLPLEAFTRHRQPRGWEQLEQCGYPVQRLVALYLAARLSWNQVDQVIRNALASPGSGGDLGEAIREQPEQARLALTLAAAESERFVRQGTGNDEAGAASADVVSLTCPVAAGECAGPADSGDALLERNYPTGAEFLGDGGDVSFSTRGTQNWTVERLLQAHRQLEERGYVFVGYHGTFLEAAQSIVFGGVRARSQDLDAIWRGFYIAGDPALAYGYAQDQEPDARGRIRNGALLRVYVPRWSLPGFYRTGLTLAAPEAAGEVERLIGHPLPLRLDAITGPEEEGGRVTILGWPLAERTVVIPSAIPTDPRNVGGDLDPSSIPDKEQAISALPDYASQPGKPPREDLKHHHHHH

SEQ ID NO: 104 - DNA, 2052 bp, Artificial Sequence
  source: /note="Description of Artificial Sequence: Synthetic polynucleotide"
atgaaaaaaatctggctggctctggcaggtctggttctggcgttctccgcctctgctagcagcgcactgtctgaagcttttcagaccgatggtattaccggcatgacggcggccgcaaaagcgttcaacaaaaccgctgcagccggcggtggcgccggtggcgcagctgcagccggtacgcaacatgcgagtaaagccgaggaagccttcgacctctggaacgaatgcgccaaggcctgcgtgctcgacctcaaggacggcgtgcgttccagccgcatgagcgtcgacccggccatcgccgacaccaacggccagggcgtgctgcactactccatggtcctggagggcggcaacgacgcgctcaagctggccatcgacaacgccctcagcatcaccagcgacggcctgaccatccgcctcgaaggcggcgtcgagccgaacaagccggtgcgctacagctacacgcgccaggcgcgcggcagttggtcgctgaactggctggtaccgatcggccacgagaagccctcgaacatcaaggtgttcatccacgaactgaacgccggtaaccagctcagccacatgtcgccgatctacaccatcgagatgggcgacgagttgctggcgaagctggcgcgcgatgccaccttcttcgtcagggcgcacgagagcaacgagatgcagccgacgctcgccatcagccatgccggggtcagcgtggtcatggctcaggcccagccgcgccgggaaaagcgctggagcgaatgggccagcggcaaggtgttgtgcctgctcgacccgctggacggggtctacaactacctcgcccagcagcgctgcaacctcgacgatacctgggaaggcaagatctaccgggtgctcgccggcaacccggcgaagcatgacctggacatcaagcccacggtcatcagtcatcgcctgcatttccccgagggcggcagcctggccgcgctgaccgcgcaccaggcctgccacctgccgctggaggccttcactcgtcatcgccagccgcgcggctgggaacaactggagcagtgcggctatccggtgcagcggctggtcgccctctacctggcggcgcgactgtcgtggaaccaggtcgaccaggtgatccgcaacgccctggccagccccggcagcggcggcgacctgggcgaagcgatccgcgagcagccggagcaggcccgtctggccctgaccctggccgccgccgagagcgagcgcttcgtccggcagggcaccggcaacgacgaggccggcgcggccagcgccgacgtggtgagcctgacctgcccggtcgccgccggtgaatgcgcgggcccggcggacagcggcgacgccctgctggagcgcaactatcccactggcgcggagttcctcggcgacggcggcgacgtcagcttcagcacccgcggcacgcagaactggacggtggagcggctgctccaggcgcaccgccaactggaggagcgcggctatgtgttcgtcggctaccacggcaccttcctcgaagcggcgcaaagcatcgtcttcggcggggtgcgcgcgcgcagccaggacctcgacgcgatctggcgcggtttctatatcgccggcgatccggcgctggcctacggctacgcccaggaccaggaacccgacgcgcgcggccggatccgcaacggtgccctgctgcgggtctatgtgccgcgctggagtctgccgggcttctaccgcaccggcctgaccctggccgcgccggaggcggcgggcgaggtcgaacggctgatcggccatccgctgccgctgcgcctggacgccatcaccggccccgaggaggaaggcgggcgcgtgaccattctcggctggccgctggccgagcgcaccgtggtgattccctcggcgatccccaccgacccgcgcaacgtcggcggcgacctcgacccgtccagcatccccgacaaggaacaggcgatcagcgccctgccggactacgccagccagcccggcaaaccgccgcgcgaggacttgaagcaccaccaccaccaccactga

SEQ ID NO: 105 - protein, 683 aa, Artificial Sequence
  source: /note="Description of Artificial Sequence: Synthetic polypeptide"
MKKIWLALAGLVLAFSASASSALSEAFQTDGITGMTAAAKAFNKTAAAGGGAGGAAAAGTQHASKAEEAFDLWNECAKACVLDLKDGVRSSRMSVDPAIADTNGQGVLHYSMVLEGGNDALKLAIDNALSITSDGLTIRLEGGVEPNKPVRYSYTRQARGSWSLNWLVPIGHEKPSNIKVFIHELNAGNQLSHMSPIYTIEMGDELLAKLARDATFFVRAHESNEMQPTLAISHAGVSVVMAQAQPRREKRWSEWASGKVLCLLDPLDGVYNYLAQQRCNLDDTWEGKIYRVLAGNPAKHDLDIKPTVISHRLHFPEGGSLAALTAHQACHLPLEAFTRHRQPRGWEQLEQCGYPVQRLVALYLAARLSWNQVDQVIRNALASPGSGGDLGEAIREQPEQARLALTLAAAESERFVRQGTGNDEAGAASADVVSLTCPVAAGECAGPADSGDALLERNYPTGAEFLGDGGDVSFSTRGTQNWTVERLLQAHRQLEERGYVFVGYHGTFLEAAQSIVFGGVRARSQDLDAIWRGFYIAGDPALAYGYAQDQEPDARGRIRNGALLRVYVPRWSLPGFYRTGLTLAAPEAAGEVERLIGHPLPLRLDAITGPEEEGGRVTILGWPLAERTVVIPSAIPTDPRNVGGDLDPSSIPDKEQAISALPDYASQPGKPPREDLKHHHHHH

SEQ ID NO: 106 - DNA, 2028 bp, Artificial Sequence
  source: /note="Description of Artificial Sequence: Synthetic polynucleotide"
atgaaaaaaatctggctggctctggcaggtctggttctggcgttctccgcctctgctagcaccctgattagcaccgatgcgacgtctattaacgatctggacatcgcagtcgcggcctggaaccgtcaggcaaacaataccggcgctaatagtaaatatgtgacgagcgttgccgaggaagccttcgacctctggaacgaatgcgccaaggcctgcgtgctcgacctcaaggacggcgtgcgttccagccgcatgagcgtcgacccggccatcgccgacaccaacggccagggcgtgctgcactactccatggtcctggagggcggcaacgacgcgctcaagctggccatcgacaacgccctcagcatcaccagcgacggcctgaccatccgcctcgaaggcggcgtcgagccgaacaagccggtgcgctacagctacacgcgccaggcgcgcggcagttggtcgctgaactggctggtaccgatcggccacgagaagccctcgaacatcaaggtgttcatccacgaactgaacgccggtaaccagctcagccacatgtcgccgatctacaccatcgagatgggcgacgagttgctggcgaagctggcgcgcgatgccaccttcttcgtcagggcgcacgagagcaacgagatgcagccgacgctcgccatcagccatgccggggtcagcgtggtcatggctcaggcccagccgcgccgggaaaagcgctggagcgaatgggccagcggcaaggtgttgtgcctgctcgacccgctggacggggtctacaactacctcgcccagcagcgctgcaacctcgacgatacctgggaaggcaagatctaccgggtgctcgccggcaacccggcgaagcatgacctggacatcaagcccacggtcatcagtcatcgcctgcatttccccgagggcggcagcctggccgcgctgaccgcgcaccaggcctgccacctgccgctggaggccttcactcgtcatcgccagccgcgcggctgggaacaactggagcagtgcggctatccggtgcagcggctggtcgccctctacctggcggcgcgactgtcgtggaaccaggtcgaccaggtgatccgcaacgccctggccagccccggcagcggcggcgacctgggcgaagcgatccgcgagcagccggagcaggcccgtctggccctgaccctggccgccgccgagagcgagcgcttcgtccggcagggcaccggcaacgacgaggccggcgcggccagcgccgacgtggtgagcctgacctgcccggtcgccgccggtgaatgcgcgggcccggcggacagcggcgacgccctgctggagcgcaactatcccactggcgcggagttcctcggcgacggcggcgacgtcagcttcagcacccgcggcacgcagaactggacggtggagcggctgctccaggcgcaccgccaactggaggagcgcggctatgtgttcgtcggctaccacggcaccttcctcgaagcggcgcaaagcatcgtcttcggcggggtgcgcgcgcgcagccaggacctcgacgcgatctggcgcggtttctatatcgccggcgatccggcgctggcctacggctacgcccaggaccaggaacccgacgcgcgcggccggatccgcaacggtgccctgctgcgggtctatgtgccgcgctggagtctgccgggcttctaccgcaccggcctgaccctggccgcgccggaggcggcgggcgaggtcgaacggctgatcggccatccgctgccgctgcgcctggacgccatcaccggccccgaggaggaaggcgggcgcgtgaccattctcggctggccgctggccgagcgcaccgtggtgattccctcggcgatccccaccgacccgcgcaacgtcggcggcgacctcgacccgtccagcatccccgacaaggaacaggcgatcagcgccctgccggactacgccagccagcccggcaaaccgccgcgcgaggacttgaagcaccaccaccaccaccactga

SEQ ID NO: 107 - protein, 675 aa, Artificial Sequence
  source: /note="Description of Artificial Sequence: Synthetic polypeptide"
MKKIWLALAGLVLAFSASASTLISTDATSINDLDIAVAAWNRQANNTGANSKYVTSVAEEAFDLWNECAKACVLDLKDGVRSSRMSVDPAIADTNGQGVLHYSMVLEGGNDALKLAIDNALSITSDGLTIRLEGGVEPNKPVRYSYTRQARGSWSLNWLVPIGHEKPSNIKVFIHELNAGNQLSHMSPIYTIEMGDELLAKLARDATFFVRAHESNEMQPTLAISHAGVSVVMAQAQPRREKRWSEWASGKVLCLLDPLDGVYNYLAQQRCNLDDTWEGKIYRVLAGNPAKHDLDIKPTVISHRLHFPEGGSLAALTAHQACHLPLEAFTRHRQPRGWEQLEQCGYPVQRLVALYLAARLSWNQVDQVIRNALASPGSGGDLGEAIREQPEQARLALTLAAAESERFVRQGTGNDEAGAASADVVSLTCPVAAGECAGPADSGDALLERNYPTGAEFLGDGGDVSFSTRGTQNWTVERLLQAHRQLEERGYVFVGYHGTFLEAAQSIVFGGVRARSQDLDAIWRGFYIAGDPALAYGYAQDQEPDARGRIRNGALLRVYVPRWSLPGFYRTGLTLAAPEAAGEVERLIGHPLPLRLDAITGPEEEGGRVTILGWPLAERTVVIPSAIPTDPRNVGGDLDPSSIPDKEQAISALPDYASQPGKPPREDLKHHHHHH

SEQ ID NO: 108 - DNA, 2040 bp, Artificial Sequence
  source: /note="Description of Artificial Sequence: Synthetic polynucleotide"
atgaaaaaaatctggctggctctggcaggtctggttctggcgttctccgcctctgctagcaccccgctggttgaagcagttgcggccagctctaacgcaattgcttgcaaaaacaatgccccgtggtatacgagttccgtccagagcggcaaatacgtgagcgcgatcgaaccggccgttaaagccgaggaagccttcgacctctggaacgaatgcgccaaggcctgcgtgctcgacctcaaggacggcgtgcgttccagccgcatgagcgtcgacccggccatcgccgacaccaacggccagggcgtgctgcactactccatggtcctggagggcggcaacgacgcgctcaagctggccatcgacaacgccctcagcatcaccagcgacggcctgaccatccgcctcgaaggcggcgtcgagccgaacaagccggtgcgctacagctacacgcgccaggcgcgcggcagttggtcgctgaactggctggtaccgatcggccacgagaagccctcgaacatcaaggtgttcatccacgaactgaacgccggtaaccagctcagccacatgtcgccgatctacaccatcgagatgggcgacgagttgctggcgaagctggcgcgcgatgccaccttcttcgtcagggcgcacgagagcaacgagatgcagccgacgctcgccatcagccatgccggggtcagcgtggtcatggctcaggcccagccgcgccgggaaaagcgctggagcgaatgggccagcggcaaggtgttgtgcctgctcgacccgctggacggggtctacaactacctcgcccagcagcgctgcaacctcgacgatacctgggaaggcaagatctaccgggtgctcgccggcaacccggcgaagcatgacctggacatcaagcccacggtcatcagtcatcgcctgcatttccccgagggcggcagcctggccgcgctgaccgcgcaccaggcctgccacctgccgctggaggccttcactcgtcatcgccagccgcgcggctgggaacaactggagcagtgcggctatccggtgcagcggctggtcgccctctacctggcggcgcgactgtcgtggaaccaggtcgaccaggtgatccgcaacgccctggccagccccggcagcggcggcgacctgggcgaagcgatccgcgagcagccggagcaggcccgtctggccctgaccctggccgccgccgagagcgagcgcttcgtccggcagggcaccggcaacgacgaggccggcgcggccagcgccgacgtggtgagcctgacctgcccggtcgccgccggtgaatgcgcgggcccggcggacagcggcgacgccctgctggagcgcaactatcccactggcgcggagttcctcggcgacggcggcgacgtcagcttcagcacccgcggcacgcagaactggacggtggagcggctgctccaggcgcaccgccaactggaggagcgcggctatgtgttcgtcggctaccacggcaccttcctcgaagcggcgcaaagcatcgtcttcggcggggtgcgcgcgcgcagccaggacctcgacgcgatctggcgcggtttctatatcgccggcgatccggcgctggcctacggctacgcccaggaccaggaacccgacgcgcgcggccggatccgcaacggtgccctgctgcgggtctatgtgccgcgctggagtctgccgggcttctaccgcaccggcctgaccctggccgcgccggaggcggcgggcgaggtcgaacggctgatcggccatccgctgccgctgcgcctggacgccatcaccggccccgaggaggaaggcgggcgcgtgaccattctcggctggccgctggccgagcgcaccgtggtgattccctcggcgatccccaccgacccgcgcaacgtcggcggcgacctcgacccgtccagcatccccgacaaggaacaggcgatcagcgccctgccggactacgccagccagcccggcaaaccgccgcgcgaggacttgaagcaccaccaccaccaccactga

SEQ ID NO: 109 - protein, 679 aa, Artificial Sequence
  source: /note="Description of Artificial Sequence: Synthetic polypeptide"
MKKIWLALAGLVLAFSASASTPLVEAVAASSNAIACKNNAPWYTSSVQSGKYVSAIEPAVKAEEAFDLWNECAKACVLDLKDGVRSSRMSVDPAIADTNGQGVLHYSMVLEGGNDALKLAIDNALSITSDGLTIRLEGGVEPNKPVRYSYTRQARGSWSLNWLVPIGHEKPSNIKVFIHELNAGNQLSHMSPIYTIEMGDELLAKLARDATFFVRAHESNEMQPTLAISHAGVSVVMAQAQPRREKRWSEWASGKVLCLLDPLDGVYNYLAQQRCNLDDTWEGKIYRVLAGNPAKHDLDIKPTVISHRLHFPEGGSLAALTAHQACHLPLEAFTRHRQPRGWEQLEQCGYPVQRLVALYLAARLSWNQVDQVIRNALASPGSGGDLGEAIREQPEQARLALTLAAAESERFVRQGTGNDEAGAASADVVSLTCPVAAGECAGPADSGDALLERNYPTGAEFLGDGGDVSFSTRGTQNWTVERLLQAHRQLEERGYVFVGYHGTFLEAAQSIVFGGVRARSQDLDAIWRGFYIAGDPALAYGYAQDQEPDARGRIRNGALLRVYVPRWSLPGFYRTGLTLAAPEAAGEVERLIGHPLPLRLDAITGPEEEGGRVTILGWPLAERTVVIPSAIPTDPRNVGGDLDPSSIPDKEQAISALPDYASQPGKPPREDLKHHHHHH

SEQ ID NO: 110 - DNA, 2010 bp, Artificial Sequence
  source: /note="Description of Artificial Sequence: Synthetic polynucleotide"
atgaaaaaaatctggctggctctggcaggtctggttctggcgttctccgcctctgctagcggcgcagtgaccgaatatgaagccgataaaggtgtttttccgacgagcaacgcgtctgccggcgtcgcagcagcagctgacattaatggtaaagccgaggaagccttcgacctctggaacgaatgcgccaaggcctgcgtgctcgacctcaaggacggcgtgcgttccagccgcatgagcgtcgacccggccatcgccgacaccaacggccagggcgtgctgcactactccatggtcctggagggcggcaacgacgcgctcaagctggccatcgacaacgccctcagcatcaccagcgacggcctgaccatccgcctcgaaggcggcgtcgagccgaacaagccggtgcgctacagctacacgcgccaggcgcgcggcagttggtcgctgaactggctggtaccgatcggccacgagaagccctcgaacatcaaggtgttcatccacgaactgaacgccggtaaccagctcagccacatgtcgccgatctacaccatcgagatgggcgacgagttgctggcgaagctggcgcgcgatgccaccttcttcgtcagggcgcacgagagcaacgagatgcagccgacgctcgccatcagccatgccggggtcagcgtggtcatggctcaggcccagccgcgccgggaaaagcgctggagcgaatgggccagcggcaaggtgttgtgcctgctcgacccgctggacggggtctacaactacctcgcccagcagcgctgcaacctcgacgatacctgggaaggcaagatctaccgggtgctcgccggcaacccggcgaagcatgacctggacatcaagcccacggtcatcagtcatcgcctgcatttccccgagggcggcagcctggccgcgctgaccgcgcaccaggcctgccacctgccgctggaggccttcactcgtcatcgccagccgcgcggctgggaacaactggagcagtgcggctatccggtgcagcggctggtcgccctctacctggcggcgcgactgtcgtggaaccaggtcgaccaggtgatccgcaacgccctggccagccccggcagcggcggcgacctgggcgaagcgatccgcgagcagccggagcaggcccgtctggccctgaccctggccgccgccgagagcgagcgcttcgtccggcagggcaccggcaacgacgaggccggcgcggccagcgccgacgtggtgagcctgacctgcccggtcgccgccggtgaatgcgcgggcccggcggacagcggcgacgccctgctggagcgcaactatcccactggcgcggagttcctcggcgacggcggcgacgtcagcttcagcacccgcggcacgcagaactggacggtggagcggctgctccaggcgcaccgccaactggaggagcgcggctatgtgttcgtcggctaccacggcaccttcctcgaagcggcgcaaagcatcgtcttcggcggggtgcgcgcgcgcagccaggacctcgacgcgatctggcgcggtttctatatcgccggcgatccggcgctggcctacggctacgcccaggaccaggaacccgacgcgcgcggccggatccgcaacggtgccctgctgcgggtctatgtgccgcgctggagtctgccgggcttctaccgcaccggcctgaccctggccgcgccggaggcggcgggcgaggtcgaacggctgatcggccatccgctgccgctgcgcctggacgccatcaccggccccgaggaggaaggcgggcgcgtgaccattctcggctggccgctggccgagcgcaccgtggtgattccctcggcgatccccaccgacccgcgcaacgtcggcggcgacctcgacccgtccagcatccccgacaaggaacaggcgatcagcgccctgccggactacgccagccagcccggcaaaccgccgcgcgaggacttgaagcaccaccaccaccaccactga

SEQ ID NO: 111 - protein, 669 aa, Artificial Sequence
  source: /note="Description of Artificial Sequence: Synthetic polypeptide"
MKKIWLALAGLVLAFSASASGAVTEYEADKGVFPTSNASAGVAAAADINGKAEEAFDLWNECAKACVLDLKDGVRSSRMSVDPAIADTNGQGVLHYSMVLEGGNDALKLAIDNALSITSDGLTIRLEGGVEPNKPVRYSYTRQARGSWSLNWLVPIGHEKPSNIKVFIHELNAGNQLSHMSPIYTIEMGDELLAKLARDATFFVRAHESNEMQPTLAISHAGVSVVMAQAQPRREKRWSEWASGKVLCLLDPLDGVYNYLAQQRCNLDDTWEGKIYRVLAGNPAKHDLDIKPTVISHRLHFPEGGSLAALTAHQACHLPLEAFTRHRQPRGWEQLEQCGYPVQRLVALYLAARLSWNQVDQVIRNALASPGSGGDLGEAIREQPEQARLALTLAAAESERFVRQGTGNDEAGAASADVVSLTCPVAAGECAGPADSGDALLERNYPTGAEFLGDGGDVSFSTRGTQNWTVERLLQAHRQLEERGYVFVGYHGTFLEAAQSIVFGGVRARSQDLDAIWRGFYIAGDPALAYGYAQDQEPDARGRIRNGALLRVYVPRWSLPGFYRTGLTLAAPEAAGEVERLIGHPLPLRLDAITGPEEEGGRVTILGWPLAERTVVIPSAIPTDPRNVGGDLDPSSIPDKEQAISALPDYASQPGKPPREDLKHHHHHH

SEQ ID NO: 112 - DNA, 1983 bp, Artificial Sequence
  source: /note="Description of Artificial Sequence: Synthetic polynucleotide"
atgaaaaagatttggctggcgctggctggtttagttttagcgtttagcgctagcgccgccgaggaagccttcgacctctggaacgaatgcgccaaggcctgcgtgctcgacctcaaggacggcgtgcgttccagccgcatgagcgtcgacccggccatcgccgacaccaacggccagggcgtgctgcactactccatggtcctggagggcggcaacgacgcgctcaagctggccatcgacaacgccctcagcatcaccagcgacggcctgaccatccgcctcgaaggcggcgtcgagccgaacaagccggtgcgctacagctacacgcgccaggcgcgcggcagttggtcgctgaactggctggtaccgatcggccacgagaagccctcgaacatcaaggtgttcatccacgaactgaacgccggtaaccagctcagccacatgtcgccgatctacaccatcgagatgggcgacgagttgctggcgaagctggcgcgcgatgccaccttcttcgtcagggcgcacgagagcaacgagatgcagccgacgctcgccatcagccatgccggggtcagcgtggtcatggctcaggcccagccgcgccgggaaaagcgctggagcgaatgggccagcggcaaggtgttgtgcctgctcgacccgctggacggggtctacaactacctcgcccagcagcgctgcaacctcgacgatacctgggaaggcaagatctaccgggtgctcgccggcaacccggcgaagcatgacctggacatcaagcccacggtcatcagtcatcgcctgcatttccccgagggcggcagcctggccgcgctgaccgcgcaccaggcctgccacctgccgctggaggccttcactagtgcggtgaccggctattacctgaaccatggtacctggccgaaagataatacgagcgcgggcgttgcaagctctccgaccgacattaaacatcgccagccgcgcggctgggaacaactggagcagtgcggctatccggtgcagcggctggtcgccctctacctggcggcgcgactgtcgtggaaccaggtcgaccaggtgatccgcaacgccctggccagccccggcagcggcggcgacctgggcgaagcgatccgcgagcagccggagcaggcccgtctggccctgaccctggccgccgccgagagcgagcgcttcgtccggcagggcaccggcaacgacgaggccggcgcggccagcgccgacgtggtgagcctgacctgcccggtcgccgccggtgaatgcgcgggcccggcggacagcggcgacgccctgctggagcgcaactatcccactggcgcggagttcctcggcgacggcggcgacgtcagcttcagcacccgcggcacgcagaactggacggtggagcggctgctccaggcgcaccgccaactggaggagcgcggctatgtgttcgtcggctaccacggcaccttcctcgaagcggcgcaaagcatcgtcttcggcggggtgcgcgcgcgcagccaggacctcgacgcgatctggcgcggtttctatatcgccggcgatccggcgctggcctacggctacgcccaggaccaggaacccgacgcgcgcggccggatccgcaacggtgccctgctgcgggtctatgtgccgcgctggagtctgccgggcttctaccgcaccggcctgaccctggccgcgccggaggcggcgggcgaggtcgaacggctgatcggccatccgctgccgctgcgcctggacgccatcaccggccccgaggaggaaggcgggcgcgtgaccattctcggctggccgctggccgagcgcaccgtggtgattccctcggcgatccccaccgacccgcgcaacgtcggcggcgacctcgacccgtccagcatccccgacaaggaacaggcgatcagcgccctgccggactacgccagccagcccggcaaaccgccgcgcgaggacttgaagtga

SEQ ID NO: 113 - protein, 660 aa, Artificial Sequence
  source: /note="Description of Artificial Sequence: Synthetic polypeptide"
MKKIWLALAGLVLAFSASAAEEAFDLWNECAKACVLDLKDGVRSSRMSVDPAIADTNGQGVLHYSMVLEGGNDALKLAIDNALSITSDGLTIRLEGGVEPNKPVRYSYTRQARGSWSLNWLVPIGHEKPSNIKVFIHELNAGNQLSHMSPIYTIEMGDELLAKLARDATFFVRAHESNEMQPTLAISHAGVSVVMAQAQPRREKRWSEWASGKVLCLLDPLDGVYNYLAQQRCNLDDTWEGKIYRVLAGNPAKHDLDIKPTVISHRLHFPEGGSLAALTAHQACHLPLEAFTSAVTGYYLNHGTWPKDNTSAGVASSPTDIKHRQPRGWEQLEQCGYPVQRLVALYLAARLSWNQVDQVIRNALASPGSGGDLGEAIREQPEQARLALTLAAAESERFVRQGTGNDEAGAASADVVSLTCPVAAGECAGPADSGDALLERNYPTGAEFLGDGGDVSFSTRGTQNWTVERLLQAHRQLEERGYVFVGYHGTFLEAAQSIVFGGVRARSQDLDAIWRGFYIAGDPALAYGYAQDQEPDARGRIRNGALLRVYVPRWSLPGFYRTGLTLAAPEAAGEVERLIGHPLPLRLDAITGPEEEGGRVTILGWPLAERTVVIPSAIPTDPRNVGGDLDPSSIPDKEQAISALPDYASQPGKPPREDLK

SEQ ID NO: 114 - DNA, 1983 bp, Artificial Sequence
  source: /note="Description of Artificial Sequence: Synthetic polynucleotide"
atgaaaaagatttggctggcgctggctggtttagttttagcgtttagcgctagcgccgccgaggaagccttcgacctctggaacgaatgcgccaaggcctgcgtgctcgacctcaaggacggcgtgcgttccagccgcatgagcgtcgacccggccatcgccgacaccaacggccagggcgtgctgcactactccatggtcctggagggcggcaacgacgcgctcaagctggccatcgacaacgccctcagcatcaccagcgacggcctgaccatccgcctcgaaggcggcgtcgagccgaacaagccggtgcgctacagctacacgcgccaggcgcgcggcagttggtcgctgaactggctggtaccgatcggccacgagaagccctcgaacatcaaggtgttcatccacgaactgaacgccggtaaccagctcagccacatgtcgccgatctacaccatcgagatgggcgacgagttgctggcgaagctggcgcgcgatgccaccttcttcgtcagggcgcacgagagcaacgagatgcagccgacgctcgccatcagccatgccggggtcagcgtggtcatggctcaggcccagccgcgccgggaaaagcgctggagcgaatgggccagcggcaaggtgttgtgcctgctcgacccgctggacggggtctacaactacctcgcccagcagcgctgcaacctcgacgatacctgggaaggcaagatctaccgggtgctcgccggcaacccggcgaagcatgacctggacatcaagcccacggtcatcagtcatcgcctgcatttccccgagggcggcagcctggccgcgctgaccgcgcaccaggcctgccacctgccgctggaggccttcactcgtcatcgccagccgcgcggctgggaacaactggagcagtgcggctatccggtgcagcggctggtcgccctctacctggcggcgcgactgtcgtggaaccaggtcgaccaggtgatccgcaacgccctggccagccccggcagcggcggcgacctgggcgaagcgatccgcgagcagccggagcaggcccgtctggccctgaccctggccgccgccgagagcgagcgcttcgtccggcagggcaccggcaacgacgaggccggcgcggccagcgccgacgtggtgagcctgacctgcccggtcgccgccggtgaatgcgcgggcccggcggacagcggcgacgccctgctggagcgcaactatcccactggcgcggagttcctcggcgacggcggcgacgtcagtgcggtgaccggctattacctgaaccatggtacctggccgaaagataatacgagcgcgggcgttgcaagctctccgaccgacattaaattcagcacccgcggcacgcagaactggacggtggagcggctgctccaggcgcaccgccaactggaggagcgcggctatgtgttcgtcggctaccacggcaccttcctcgaagcggcgcaaagcatcgtcttcggcggggtgcgcgcgcgcagccaggacctcgacgcgatctggcgcggtttctatatcgccggcgatccggcgctggcctacggctacgcccaggaccaggaacccgacgcgcgcggccggatccgcaacggtgccctgctgcgggtctatgtgccgcgctggagtctgccgggcttctaccgcaccggcctgaccctggccgcgccggaggcggcgggcgaggtcgaacggctgatcggccatccgctgccgctgcgcctggacgccatcaccggccccgaggaggaaggcgggcgcgtgaccattctcggctggccgctggccgagcgcaccgtggtgattccctcggcgatccccaccgacccgcgcaacgtcggcggcgacctcgacccgtccagcatccccgacaaggaacaggcgatcagcgccctgccggactacgccagccagcccggcaaaccgccgcgcgaggacttgaagtga

SEQ ID NO: 115 - protein, 660 aa, Artificial Sequence
  source: /note="Description of Artificial Sequence: Synthetic polypeptide"
MKKIWLALAGLVLAFSASAAEEAFDLWNECAKACVLDLKDGVRSSRMSVDPAIADTNGQGVLHYSMVLEGGNDALKLAIDNALSITSDGLTIRLEGGVEPNKPVRYSYTRQARGSWSLNWLVPIGHEKPSNIKVFIHELNAGNQLSHMSPIYTIEMGDELLAKLARDATFFVRAHESNEMQPTLAISHAGVSVVMAQAQPRREKRWSEWASGKVLCLLDPLDGVYNYLAQQRCNLDDTWEGKIYRVLAGNPAKHDLDIKPTVISHRLHFPEGGSLAALTAHQACHLPLEAFTRHRQPRGWEQLEQCGYPVQRLVALYLAARLSWNQVDQVIRNALASPGSGGDLGEAIREQPEQARLALTLAAAESERFVRQGTGNDEAGAASADVVSLTCPVAAGECAGPADSGDALLERNYPTGAEFLGDGGDVSAVTGYYLNHGTWPKDNTSAGVASSPTDIKFSTRGTQNWTVERLLQAHRQLEERGYVFVGYHGTFLEAAQSIVFGGVRARSQDLDAIWRGFYIAGDPALAYGYAQDQEPDARGRIRNGALLRVYVPRWSLPGFYRTGLTLAAPEAAGEVERLIGHPLPLRLDAITGPEEEGGRVTILGWPLAERTVVIPSAIPTDPRNVGGDLDPSSIPDKEQAISALPDYASQPGKPPREDLK

SEQ ID NO: 116 - DNA, 1983 bp, Artificial Sequence
  source: /note="Description of Artificial Sequence: Synthetic polynucleotide"
atgaaaaagatttggctggcgctggctggtttagttttagcgtttagcgctagcgccgccgaggaagccttcgacctctggaacgaatgcgccaaggcctgcgtgctcgacctcaaggacggcgtgcgttccagccgcatgagcgtcgacccggccatcgccgacaccaacggccagggcgtgctgcactactccatggtcctggagggcggcaacgacgcgctcaagctggccatcgacaacgccctcagcatcaccagcgacggcctgaccatccgcctcgaaggcggcgtcgagccgaacaagccggtgcgctacagctacacgcgccaggcgcgcggcagttggtcgctgaactggctggtaccgatcggccacgagaagccctcgaacatcaaggtgttcatccacgaactgaacgccggtaaccagctcagccacatgtcgccgatctacaccatcgagatgggcgacgagttgctggcgaagctggcgcgcgatgccaccttcttcgtcagggcgcacgagagcaacgagatgcagccgacgctcgccatcagccatgccggggtcagcgtggtcatggctcaggcccagccgcgccgggaaaagcgctggagcgaatgggccagcggcaaggtgttgtgcctgctcgacccgctggacggggtctacaactacctcgcccagcagcgctgcaacctcgacgatacctgggaaggcaagatctaccgggtgctcgccggcaacccggcgaagcatgacctggacatcaagcccacggtcatcagtcatcgcctgcatttccccgagggcggcagcctggccgcgctgaccgcgcaccaggcctgccacctgccgctggaggccttcactcgtcatcgccagccgcgcggctgggaacaactggagcagtgcggctatccggtgcagcggctggtcgccctctacctggcggcgcgactgtcgtggaaccaggtcgaccaggtgatccgcaacgccctggccagccccggcagcggcggcgacctgggcgaagcgatccgcgagcagccggagcaggcccgtctggccctgaccctggccgccgccgagagcgagcgcttcgtccggcagggcaccggcaacgacgaggccggcgcggccagcgccgacgtggtgagcctgacctgcccggtcgccgccggtgaatgcgcgggcccggcggacagcggcgacgccctgctggagcgcaactatcccactggcgcggagttcctcggcgacggcggcgacgtcagcttcagcacccgcggcacgcagaactggacggtggagcggctgctccaggcgcaccgccaactggaggagcgcggctatgtgttcgtcggctaccacggcaccttcctcgaagcggcgcaaagcatcgtcttcggcggggtgcgcgcgcgcagccaggacctcgacgcgatctggcgcggtttctatatcgccggcgatccggcgctggcctacggctacgcccaggaccaggaacccgacgcgcgcggccggatccgcaacggtgccctgctgcgggtctatgtgccgcgctggagtctgccgggcttctaccgcaccggcctgaccctgagtgcggtgaccggctattacctgaaccatggtacctggccgaaagataatacgagcgcgggcgttgcaagctctccgaccgacattaaagcgccggaggcggcgggcgaggtcgaacggctgatcggccatccgctgccgctgcgcctggacgccatcaccggccccgaggaggaaggcgggcgcgtgaccattctcggctggccgctggccgagcgcaccgtggtgattccctcggcgatccccaccgacccgcgcaacgtcggcggcgacctcgacccgtccagcatccccgacaaggaacaggcgatcagcgccctgccggactacgccagccagcccggcaaaccgccgcgcgaggacttgaagtga

SEQ ID NO: 117 - protein, 660 aa, Artificial Sequence
  source: /note="Description of Artificial Sequence: Synthetic polypeptide"
MKKIWLALAGLVLAFSASAAEEAFDLWNECAKACVLDLKDGVRSSRMSVDPAIADTNGQGVLHYSMVLEGGNDALKLAIDNALSITSDGLTIRLEGGVEPNKPVRYSYTRQARGSWSLNWLVPIGHEKPSNIKVFIHELNAGNQLSHMSPIYTIEMGDELLAKLARDATFFVRAHESNEMQPTLAISHAGVSVVMAQAQPRREKRWSEWASGKVLCLLDPLDGVYNYLAQQRCNLDDTWEGKIYRVLAGNPAKHDLDIKPTVISHRLHFPEGGSLAALTAHQACHLPLEAFTRHRQPRGWEQLEQCGYPVQRLVALYLAARLSWNQVDQVIRNALASPGSGGDLGEAIREQPEQARLALTLAAAESERFVRQGTGNDEAGAASADVVSLTCPVAAGECAGPADSGDALLERNYPTGAEFLGDGGDVSFSTRGTQNWTVERLLQAHRQLEERGYVFVGYHGTFLEAAQSIVFGGVRARSQDLDAIWRGFYIAGDPALAYGYAQDQEPDARGRIRNGALLRVYVPRWSLPGFYRTGLTLSAVTGYYLNHGTWPKDNTSAGVASSPTDIKAPEAAGEVERLIGHPLPLRLDAITGPEEEGGRVTILGWPLAERTVVIPSAIPTDPRNVGGDLDPSSIPDKEQAISALPDYASQPGKPPREDLK

SEQ ID NO: 118 - DNA, 1953 bp, Artificial Sequence
  source: /note="Description of Artificial Sequence: Synthetic polynucleotide"
atgaaaaagatttggctggcgctggctggtttagttttagcgtttagcgctagcgccgccgaggaagccttcgacctctggaacgaatgcgccaaggcctgcgtgctcgacctcaaggacggcgtgcgttccagccgcatgagcgtcgacccggccatcgccgacaccaacggccagggcgtgctgcactactccatggtcctggagggcggcaacgacgcgctcaagctggccatcgacaacgccctcagcatcaccagcgacggcctgaccatccgcctcgaaggcggcgtcgagccgaacaagccggtgcgctacagctacacgcgccaggcgcgcggcagttggtcgctgaactggctggtaccgatcggccacgagaagccctcgaacatcaaggtgttcatccacgaactgaacgccggtaaccagctcagccacatgtcgccgatctacaccatcgagatgggcgacgagttgctggcgaagctggcgcgcgatgccaccttcttcgtcagggcgcacgagagcaacgagatgcagccgacgctcgccatcagccatgccggggtcagcgtggtcatggctcaggcccagccgcgccgggaaaagcgctggagcgaatgggccagcggcaaggtgttgtgcctgctcgacccgctggacggggtctacaactacctcgcccagcagcgctgcaacctcgacgatacctgggaaggcaagatctaccgggtgctcgccggcaacccggcgaagcatgacctggacatcaagcccacggtcatcagtcatcgcctgcatttccccgagggcggcagcctggccgcgctgaccgcgcaccaggcctgccacctgccgctggaggccttcactcgtcatcgccagccgcgcggctgggaacaactggagcagtgcggctatccggtgcagcggctggtcgccctctacctggcggcgcgactgtcgtggaaccaggtcgaccaggtgatccgcaacgccctggccagccccggcagcggcggcgacctgggcgaagcgatccgcgagcagccggagcaggcccgtctggccctgaccctggccgccgccgagagcgagcgcttcgtccggcagggcaccggcaacgacgaggccggcgcggccagcgccgacgtggtgagcctgacctgcccggtcgccgccggtgaatgcgcgggcccggcggacagcggcgacgccctgctggagcgcaactatcccactggcgcggagttcctcggcgacggcggcgacgtcggcacctggccgaaagataacacgagtgcgggtgtggcaagctctccgaccgacattaaattcagcacccgcggcacgcagaactggacggtggagcggctgctccaggcgcaccgccaactggaggagcgcggctatgtgttcgtcggctaccacggcaccttcctcgaagcggcgcaaagcatcgtcttcggcggggtgcgcgcgcgcagccaggacctcgacgcgatctggcgcggtttctatatcgccggcgatccggcgctggcctacggctacgcccaggaccaggaacccgacgcgcgcggccggatccgcaacggtgccctgctgcgggtctatgtgccgcgctggagtctgccgggcttctaccgcaccggcctgaccctggccgcgccggaggcggcgggcgaggtcgaacggctgatcggccatccgctgccgctgcgcctggacgccatcaccggccccgaggaggaaggcgggcgcgtgaccattctcggctggccgctggccgagcgcaccgtggtgattccctcggcgatccccaccgacccgcgcaacgtcggcggcgacctcgacccgtccagcatccccgacaaggaacaggcgatcagcgccctgccggactacgccagccagcccggcaaaccgccgcgcgaggacttgaagtga

SEQ ID NO: 119 - protein, 650 aa, Artificial Sequence
  source: /note="Description of Artificial Sequence: Synthetic polypeptide"
MKKIWLALAGLVLAFSASAAEEAFDLWNECAKACVLDLKDGVRSSRMSVDPAIADTNGQGVLHYSMVLEGGNDALKLAIDNALSITSDGLTIRLEGGVEPNKPVRYSYTRQARGSWSLNWLVPIGHEKPSNIKVFIHELNAGNQLSHMSPIYTIEMGDELLAKLARDATFFVRAHESNEMQPTLAISHAGVSVVMAQAQPRREKRWSEWASGKVLCLLDPLDGVYNYLAQQRCNLDDTWEGKIYRVLAGNPAKHDLDIKPTVISHRLHFPEGGSLAALTAHQACHLPLEAFTRHRQPRGWEQLEQCGYPVQRLVALYLAARLSWNQVDQVIRNALASPGSGGDLGEAIREQPEQARLALTLAAAESERFVRQGTGNDEAGAASADVVSLTCPVAAGECAGPADSGDALLERNYPTGAEFLGDGGDVGTWPKDNTSAGVASSPTDIKFSTRGTQNWTVERLLQAHRQLEERGYVFVGYHGTFLEAAQSIVFGGVRARSQDLDAIWRGFYIAGDPALAYGYAQDQEPDARGRIRNGALLRVYVPRWSLPGFYRTGLTLAAPEAAGEVERLIGHPLPLRLDAITGPEEEGGRVTILGWPLAERTVVIPSAIPTDPRNVGGDLDPSSIPDKEQAISALPDYASQPGKPPREDLK

SEQ ID NO: 120 - DNA, 1953 bp, Artificial Sequence
  source: /note="Description of Artificial Sequence: Synthetic polynucleotide"
atgaaaaagatttggctggcgctggctggtttagttttagcgtttagcgctagcgccgccgaggaagccttcgacctctggaacgaatgcgccaaggcctgcgtgctcgacctcaaggacggcgtgcgttccagccgcatgagcgtcgacccggccatcgccgacaccaacggccagggcgtgctgcactactccatggtcctggagggcggcaacgacgcgctcaagctggccatcgacaacgccctcagcatcaccagcgacggcctgaccatccgcctcgaaggcggcgtcgagccgaacaagccggtgcgctacagctacacgcgccaggcgcgcggcagttggtcgctgaactggctggtaccgatcggccacgagaagccctcgaacatcaaggtgttcatccacgaactgaacgccggtaaccagctcagccacatgtcgccgatctacaccatcgagatgggcgacgagttgctggcgaagctggcgcgcgatgccaccttcttcgtcagggcgcacgagagcaacgagatgcagccgacgctcgccatcagccatgccggggtcagcgtggtcatggctcaggcccagccgcgccgggaaaagcgctggagcgaatgggccagcggcaaggtgttgtgcctgctcgacccgctggacggggtctacaactacctcgcccagcagcgctgcaacctcgacgatacctgggaaggcaagatctaccgggtgctcgccggcaacccggcgaagcatgacctggacatcaagcccacggtcatcagtcatcgcctgcatttccccgagggcggcagcctggccgcgctgaccgcgcaccaggcctgccacctgccgctggaggccttcactcgtcatcgccagccgcgcggctgggaacaactggagcagtgcggctatccggtgcagcggctggtcgccctctacctggcggcgcgactgtcgtggaaccaggtcgaccaggtgatccgcaacgccctggccagccccggcagcggcggcgacctgggcgaagcgatccgcgagcagccggagcaggcccgtctggccctgaccctggccgccgccgagagcgagcgcttcgtccggcagggcaccggcaacgacgaggccggcgcggccagcgccgacgtggtgagcctgacctgcccggtcgccgccggtgaatgcgcgggcccggcggacagcggcgacgccctgctggagcgcaactatcccactggcgcggagttcctcggcgacggcggcgacgtcagcttcagcacccgcggcacgcagaactggacggtggagcggctgctccaggcgcaccgccaactggaggagcgcggctatgtgttcgtcggctaccacggcaccttcctcgaagcggcgcaaagcatcgtcttcggcggggtgcgcgcgcgcagccaggacctcgacgcgatctggcgcggtttctatatcgccggcgatccggcgctggcctacggctacgcccaggaccaggaacccgacgcgcgcggccggatccgcaacggtgccctgctgcgggtctatgtgccgcgctggagtctgccgggcttctaccgcaccggcctgaccctgggcacctggccgaaagataacacgagtgcgggtgtggcaagctctccgaccgacattaaagcgccggaggcggcgggcgaggtcgaacggctgatcggccatccgctgccgctgcgcctggacgccatcaccggccccgaggaggaaggcgggcgcgtgaccattctcggctggccgctggccgagcgcaccgtggtgattccctcggcgatccccaccgacccgcgcaacgtcggcggcgacctcgacccgtccagcatccccgacaaggaacaggcgatcagcgccctgccggactacgccagccagcccggcaaaccgccgcgcgaggacttgaagtga

SEQ ID NO: 121 - protein, 650 aa, Artificial Sequence
  source: /note="Description of Artificial Sequence: Synthetic polypeptide"
MKKIWLALAGLVLAFSASAAEEAFDLWNECAKACVLDLKDGVRSSRMSVDPAIADTNGQGVLHYSMVLEGGNDALKLAIDNALSITSDGLTIRLEGGVEPNKPVRYSYTRQARGSWSLNWLVPIGHEKPSNIKVFIHELNAGNQLSHMSPIYTIEMGDELLAKLARDATFFVRAHESNEMQPTLAISHAGVSVVMAQAQPRREKRWSEWASGKVLCLLDPLDGVYNYLAQQRCNLDDTWEGKIYRVLAGNPAKHDLDIKPTVISHRLHFPEGGSLAALTAHQACHLPLEAFTRHRQPRGWEQLEQCGYPVQRLVALYLAARLSWNQVDQVIRNALASPGSGGDLGEAIREQPEQARLALTLAAAESERFVRQGTGNDEAGAASADVVSLTCPVAAGECAGPADSGDALLERNYPTGAEFLGDGGDVSFSTRGTQNWTVERLLQAHRQLEERGYVFVGYHGTFLEAAQSIVFGGVRARSQDLDAIWRGFYIAGDPALAYGYAQDQEPDARGRIRNGALLRVYVPRWSLPGFYRTGLTLGTWPKDNTSAGVASSPTDIKAPEAAGEVERLIGHPLPLRLDAITGPEEEGGRVTILGWPLAERTVVIPSAIPTDPRNVGGDLDPSSIPDKEQAISALPDYASQPGKPPREDLK

SEQ ID NO: 122 - DNA, 2010 bp, Artificial Sequence
  source: /note="Description of Artificial Sequence: Synthetic polynucleotide"
atgaaaaagatttggctggcgctggctggtttagttttagcgtttagcgctagcgccgccgaggaagccttcgacctctggaacgaatgcgccaaggcctgcgtgctcgacctcaaggacggcgtgcgttccagccgcatgagcgtcgacccggccatcgccgacaccaacggccagggcgtgctgcactactccatggtcctggagggcggcaacgacgcgctcaagctggccatcgacaacgccctcagcatcaccagcgacggcctgaccatccgcctcgaaggcggcgtcgagccgaacaagccggtgcgctacagctacacgcgccaggcgcgcggcagttggtcgctgaactggctggtaccgatcggccacgagaagccctcgaacatcaaggtgttcatccacgaactgaacgccggtaaccagctcagccacatgtcgccgatctacaccatcgagatgggcgacgagttgctggcgaagctggcgcgcgatgccaccttcttcgtcagggcgcacgagagcaacgagatgcagccgacgctcgccatcagccatgccggggtcagcgtggtcatggctcaggcccagccgcgccgggaaaagcgctggagcgaatgggccagcggcaaggtgttgtgcctgctcgacccgctggacggggtctacaactacctcgcccagcagcgctgcaacctcgacgatacctgggaaggcaagatctaccgggtgctcgccggcaacccggcgaagcatgacctggacatcaagcccacggtcatcagtcatcgcctgcatttccccgagggcggcagcctggccgcgctgaccgcgcaccaggcctgccacctgccgctggaggccttcactggcacctggccgaaagataacacgagtgcgggtgtggcaagctctccgaccgacattaaacatcgccagccgcgcggctgggaacaactggagcagtgcggctatccggtgcagcggctggtcgccctctacctggcggcgcgactgtcgtggaaccaggtcgaccaggtgatccgcaacgccctggccagccccggcagcggcggcgacctgggcgaagcgatccgcgagcagccggagcaggcccgtctggccctgaccctggccgccgccgagagcgagcgcttcgtccggcagggcaccggcaacgacgaggccggcgcggccagcgccgacgtggtgagcctgacctgcccggtcgccgccggtgaatgcgcgggcccggcggacagcggcgacgccctgctggagcgcaactatcccactggcgcggagttcctcggcgacggcggcgacgtcggcacctggccgaaagataacacgagtgcgggtgtggcaagctctccgaccgacattaaattcagcacccgcggcacgcagaactggacggtggagcggctgctccaggcgcaccgccaactggaggagcgcggctatgtgttcgtcggctaccacggcaccttcctcgaagcggcgcaaagcatcgtcttcggcggggtgcgcgcgcgcagccaggacctcgacgcgatctggcgcggtttctatatcgccggcgatccggcgctggcctacggctacgcccaggaccaggaacccgacgcgcgcggccggatccgcaacggtgccctgctgcgggtctatgtgccgcgctggagtctgccgggcttctaccgcaccggcctgaccctggccgcgccggaggcggcgggcgaggtcgaacggctgatcggccatccgctgccgctgcgcctggacgccatcaccggccccgaggaggaaggcgggcgcgtgaccattctcggctggccgctggccgagcgcaccgtggtgattccctcggcgatccccaccgacccgcgcaacgtcggcggcgacctcgacccgtccagcatccccgacaaggaacaggcgatcagcgccctgccggactacgccagccagcccggcaaaccgccgcgcgaggacttgaagtga

SEQ ID NO: 123 - protein, 669 aa, Artificial Sequence
  source: /note="Description of Artificial Sequence: Synthetic polypeptide"
MKKIWLALAGLVLAFSASAAEEAFDLWNECAKACVLDLKDGVRSSRMSVDPAIADTNGQGVLHYSMVLEGGNDALKLAIDNALSITSDGLTIRLEGGVEPNKPVRYSYTRQARGSWSLNWLVPIGHEKPSNIKVFIHELNAGNQLSHMSPIYTIEMGDELLAKLARDATFFVRAHESNEMQPTLAISHAGVSVVMAQAQPRREKRWSEWASGKVLCLLDPLDGVYNYLAQQRCNLDDTWEGKIYRVLAGNPAKHDLDIKPTVISHRLHFPEGGSLAALTAHQACHLPLEAFTGTWPKDNTSAGVASSPTDIKHRQPRGWEQLEQCGYPVQRLVALYLAARLSWNQVDQVIRNALASPGSGGDLGEAIREQPEQARLALTLAAAESERFVRQGTGNDEAGAASADVVSLTCPVAAGECAGPADSGDALLERNYPTGAEFLGDGGDVGTWPKDNTSAGVASSPTDIKFSTRGTQNWTVERLLQAHRQLEERGYVFVGYHGTFLEAAQSIVFGGVRARSQDLDAIWRGFYIAGDPALAYGYAQDQEPDARGRIRNGALLRVYVPRWSLPGFYRTGLTLAAPEAAGEVERLIGHPLPLRLDAITGPEEEGGRVTILGWPLAERTVVIPSAIPTDPRNVGGDLDPSSIPDKEQAISALPDYASQPGKPPREDLK

SEQ ID NO: 124 - DNA, 2010 bp, Artificial Sequence
  source: /note="Description of Artificial Sequence: Synthetic polynucleotide"
atgaaaaagatttggctggcgctggctggtttagttttagcgtttagcgctagcgccgccgaggaagccttcgacctctggaacgaatgcgccaaggcctgcgtgctcgacctcaaggacggcgtgcgttccagccgcatgagcgtcgacccggccatcgccgacaccaacggccagggcgtgctgcactactccatggtcctggagggcggcaacgacgcgctcaagctggccatcgacaacgccctcagcatcaccagcgacggcctgaccatccgcctcgaaggcggcgtcgagccgaacaagccggtgcgctacagctacacgcgccaggcgcgcggcagttggtcgctgaactggctggtaccgatcggccacgagaagccctcgaacatcaaggtgttcatccacgaactgaacgccggtaaccagctcagccacatgtcgccgatctacaccatcgagatgggcgacgagttgctggcgaagctggcgcgcgatgccaccttcttcgtcagggcgcacgagagcaacgagatgcagccgacgctcgccatcagccatgccggggtcagcgtggtcatggctcaggcccagccgcgccgggaaaagcgctggagcgaatgggccagcggcaaggtgttgtgcctgctcgacccgctggacggggtctacaactacctcgcccagcagcgctgcaacctcgacgatacctgggaaggcaagatctaccgggtgctcgccggcaacccggcgaagcatgacctggacatcaagcccacggtcatcagtcatcgcctgcatttccccgagggcggcagcctggccgcgctgaccgcgcaccaggcctgccacctgccgctggaggccttcactggcacctggccgaaagataacacgagtgcgggtgtggcaagctctccgaccgacattaaacatcgccagccgcgcggctgggaacaactggagcagtgcggctatccggtgcagcggctggtcgccctctacctggcggcgcgactgtcgtggaaccaggtcgaccaggtgatccgcaacgccctggccagccccggcagcggcggcgacctgggcgaagcgatccgcgagcagccggagcaggcccgtctggccctgaccctggccgccgccgagagcgagcgcttcgtccggcagggcaccggcaacgacgaggccggcgcggccagcgccgacgtggtgagcctgacctgcccggtcgccgccggtgaatgcgcgggcccggcggacagcggcgacgccctgctggagcgcaactatcccactggcgcggagttcctcggcgacggcggcgacgtcagcttcagcacccgcggcacgcagaactggacggtggagcggctgctccaggcgcaccgccaactggaggagcgcggctatgtgttcgtcggctaccacggcaccttcctcgaagcggcgcaaagcatcgtcttcggcggggtgcgcgcgcgcagccaggacctcgacgcgatctggcgcggtttctatatcgccggcgatccggcgctggcctacggctacgcccaggaccaggaacccgacgcgcgcggccggatccgcaacggtgccctgctgcgggtctatgtgccgcgctggagtctgccgggcttctaccgcaccggcctgaccctgggcacctggccgaaagataacacgagtgcgggtgtggcaagctctccgaccgacattaaagcgccggaggcggcgggcgaggtcgaacggctgatcggccatccgctgccgctgcgcctggacgccatcaccggccccgaggaggaaggcgggcgcgtgaccattctcggctggccgctggccgagcgcaccgtggtgattccctcggcgatccccaccgacccgcgcaacgtcggcggcgacctcgacccgtccagcatccccgacaaggaacaggcgatcagcgccctgccggactacgccagccagcccggcaaaccgccgcgcgaggacttgaagtga

SEQ ID NO: 125 - protein, 669 aa, Artificial Sequence
  source: /note="Description of Artificial Sequence: Synthetic polypeptide"
MKKIWLALAGLVLAFSASAAEEAFDLWNECAKACVLDLKDGVRSSRMSVDPAIADTNGQGVLHYSMVLEGGNDALKLAIDNALSITSDGLTIRLEGGVEPNKPVRYSYTRQARGSWSLNWLVPIGHEKPSNIKVFIHELNAGNQLSHMSPIYTIEMGDELLAKLARDATFFVRAHESNEMQPTLAISHAGVSVVMAQAQPRREKRWSEWASGKVLCLLDPLDGVYNYLAQQRCNLDDTWEGKIYRVLAGNPAKHDLDIKPTVISHRLHFPEGGSLAALTAHQACHLPLEAFTGTWPKDNTSAGVASSPTDIKHRQPRGWEQLEQCGYPVQRLVALYLAARLSWNQVDQVIRNALASPGSGGDLGEAIREQPEQARLALTLAAAESERFVRQGTGNDEAGAASADVVSLTCPVAAGECAGPADSGDALLERNYPTGAEFLGDGGDVSFSTRGTQNWTVERLLQAHRQLEERGYVFVGYHGTFLEAAQSIVFGGVRARSQDLDAIWRGFYIAGDPALAYGYAQDQEPDARGRIRNGALLRVYVPRWSLPGFYRTGLTLGTWPKDNTSAGVASSPTDIKAPEAAGEVERLIGHPLPLRLDAITGPEEEGGRVTILGWPLAERTVVIPSAIPTDPRNVGGDLDPSSIPDKEQAISALPDYASQPGKPPREDLK

SEQ ID NO: 126 - DNA, 2010 bp, Artificial Sequence
  source: /note="Description of Artificial Sequence: Synthetic polynucleotide"
atgaaaaagatttggctggcgctggctggtttagttttagcgtttagcgctagcgccgccgaggaagccttcgacctctggaacgaatgcgccaaggcctgcgtgctcgacctcaaggacggcgtgcgttccagccgcatgagcgtcgacccggccatcgccgacaccaacggccagggcgtgctgcactactccatggtcctggagggcggcaacgacgcgctcaagctggccatcgacaacgccctcagcatcaccagcgacggcctgaccatccgcctcgaaggcggcgtcgagccgaacaagccggtgcgctacagctacacgcgccaggcgcgcggcagttggtcgctgaactggctggtaccgatcggccacgagaagccctcgaacatcaaggtgttcatccacgaactgaacgccggtaaccagctcagccacatgtcgccgatctacaccatcgagatgggcgacgagttgctggcgaagctggcgcgcgatgccaccttcttcgtcagggcgcacgagagcaacgagatgcagccgacgctcgccatcagccatgccggggtcagcgtggtcatggctcaggcccagccgcgccgggaaaagcgctggagcgaatgggccagcggcaaggtgttgtgcctgctcgacccgctggacggggtctacaactacctcgcccagcagcgctgcaacctcgacgatacctgggaaggcaagatctaccgggtgctcgccggcaacccggcgaagcatgacctggacatcaagcccacggtcatcagtcatcgcctgcatttccccgagggcggcagcctggccgcgctgaccgcgcaccaggcctgccacctgccgctggaggccttcactcgtcatcgccagccgcgcggctgggaacaactggagcagtgcggctatccggtgcagcggctggtcgccctctacctggcggcgcgactgtcgtggaaccaggtcgaccaggtgatccgcaacgccctggccagccccggcagcggcggcgacctgggcgaagcgatccgcgagcagccggagcaggcccgtctggccctgaccctggccgccgccgagagcgagcgcttcgtccggcagggcaccggcaacgacgaggccggcgcggccagcgccgacgtggtgagcctgacctgcccggtcgccgccggtgaatgcgcgggcccggcggacagcggcgacgccctgctggagcgcaactatcccactggcgcggagttcctcggcgacggcggcgacgtcggcacctggccgaaagataacacgagtgcgggtgtggcaagctctccgaccgacattaaattcagcacccgcggcacgcagaactggacggtggagcggctgctccaggcgcaccgccaactggaggagcgcggctatgtgttcgtcggctaccacggcaccttcctcgaagcggcgcaaagcatcgtcttcggcggggtgcgcgcgcgcagccaggacctcgacgcgatctggcgcggtttctatatcgccggcgatccggcgctggcctacggctacgcccaggaccaggaacccgacgcgcgcggccggatccgcaacggtgccctgctgcgggtctatgtgccgcgctggagtctgccgggcttctaccgcaccggcctgaccctgggcacctggccgaaagataacacgagtgcgggtgtggcaagctctccgaccgacattaaagcgccggaggcggcgggcgaggtcgaacggctgatcggccatccgctgccgctgcgcctggacgccatcaccggccccgaggaggaaggcgggcgcgtgaccattctcggctggccgctggccgagcgcaccgtggtgattccctcggcgatccccaccgacccgcgcaacgtcggcggcgacctcgacccgtccagcatccccgacaaggaacaggcgatcagcgccctgccggactacgccagccagcccggcaaaccgccgcgcgaggacttgaagtga

SEQ ID NO: 127 - protein, 669 aa, Artificial Sequence
  source: /note="Description of Artificial Sequence: Synthetic polypeptide"
MKKIWLALAGLVLAFSASAAEEAFDLWNECAKACVLDLKDGVRSSRMSVDPAIADTNGQGVLHYSMVLEGGNDALKLAIDNALSITSDGLTIRLEGGVEPNKPVRYSYTRQARGSWSLNWLVPIGHEKPSNIKVFIHELNAGNQLSHMSPIYTIEMGDELLAKLARDATFFVRAHESNEMQPTLAISHAGVSVVMAQAQPRREKRWSEWASGKVLCLLDPLDGVYNYLAQQRCNLDDTWEGKIYRVLAGNPAKHDLDIKPTVISHRLHFPEGGSLAALTAHQACHLPLEAFTRHRQPRGWEQLEQCGYPVQRLVALYLAARLSWNQVDQVIRNALASPGSGGDLGEAIREQPEQARLALTLAAAESERFVRQGTGNDEAGAASADVVSLTCPVAAGECAGPADSGDALLERNYPTGAEFLGDGGDVGTWPKDNTSAGVASSPTDIKFSTRGTQNWTVERLLQAHRQLEERGYVFVGYHGTFLEAAQSIVFGGVRARSQDLDAIWRGFYIAGDPALAYGYAQDQEPDARGRIRNGALLRVYVPRWSLPGFYRTGLTLGTWPKDNTSAGVASSPTDIKAPEAAGEVERLIGHPLPLRLDAITGPEEEGGRVTILGWPLAERTVVIPSAIPTDPRNVGGDLDPSSIPDKEQAISALPDYASQPGKPPREDLK

SEQ ID NO: 128 - DNA, 2007 bp, Artificial Sequence; identical to SEQ ID NO: 100
  source: /note="Description of Artificial Sequence: Synthetic polynucleotide"

SEQ ID NO: 129 - protein, 662 aa, Artificial Sequence
  source: /note="Description of Artificial Sequence: Synthetic polypeptide"
MKKIWLALAGLVLAFSASASSAVTGYYLNHGTWPKDNTSAGVASSPTDIKAEEAFDLWNECAKACVLDLKDGVRSSRMSVDPAIADTNGQGVLHYSMVLEGGNDALKLAIDNALSITSDGLTIRLEGGVEPNKPVRYSYTRQARGSWSLNWLVPIGHEKPSNIKVFIHELNAGNQLSHMSPIYTIEMGDELLAKLARDATFFVRAHESNEMQPTLAISHAGVSVVMAQAQPRREKRWSEWASGKVLCLLDPLDGVYNYLAQQRCNLDDTWEGKIYRVLAGNPAKHDLDIKPTVISHRLHFPEGGSLAALTAHQACHLPLEAFTRHRQPRGWEQLEQCGYPVQRLVALYLAARLSWNQVDQVIRNALASPGSGGDLGEAIREQPEQARLALTLAAAESERFVRQGTGNDEAGAASADVVSLTCPVAAGECAGPADSGDALLERNYPTGAEFLGDGGDVSFSTRGTQNWTVERLLQAHRQLEERGYVFVGYHGTFLEAAQSIVFGGVRARSQDLDAIWRGFYIAGDPALAYGYAQDQEPDARGRIRNGALLRVYVPRWSLPGFYRTGLTLAAPEAAGEVERLIGHPLPLRLDAITGPEEEGGRVTILGWPLAERTVVIPSAIPTDPRNVGGDLDPSSIPDKEQAISALPDYASQPGKPPREDLK

SEQ ID NO: 130 - DNA, 1953 bp, Artificial Sequence
  source: /note="Description of Artificial Sequence: Synthetic polynucleotide"
atgaaaaagatttggctggcgctggctggtttagttttagcgtttagcgctagcgccgccgaggaagccttcgacctctggaacgaatgcgccaaggcctgcgtgctcgacctcaaggacggcgtgcgttccagccgcatgagcgtcgacccggccatcgccgacaccaacggccagggcgtgctgcactactccatggtcctggagggcggcaacgacgcgctcaagctggccatcgacaacgccctcagcatcaccagcgacggcctgaccatccgcctcgaaggcggcgtcgagccgaacaagccggtgcgctacagctacacgcgccaggcgcgcggcagttggtcgctgaactggctggtaccgatcggccacgagaagccctcgaacatcaaggtgttcatccacgaactgaacgccggtaaccagctcagccacatgtcgccgatctacaccatcgagatgggcgacgagttgctggcgaagctggcgcgcgatgccaccttcttcgtcagggcgcacgagagcaacgagatgcagccgacgctcgccatcagccatgccggggtcagcgtggtcatggctcaggcccagccgcgccgggaaaagcgctggagcgaatgggccagcggcaaggtgttgtgcctgctcgacccgctggacggggtctacaactacctcgcccagcagcgctgcaacctcgacgatacctgggaaggcaagatctaccgggtgctcgccggcaacccggcgaagcatgacctggacatcaagcccacggtcatcagtcatcgcctgcatttccccgagggcggcagcctggccgcgctgaccgcgcaccaggcctgccacctgccgctggaggccttcactggcacctggccgaaagataacacgagtgcgggtgtggcaagctctccgaccgacattaaacatcgccagccgcgcggctgggaacaactggagcagtgcggctatccggtgcagcggctggtcgccctctacctggcggcgcgactgtcgtggaaccaggtcgaccaggtgatccgcaacgccctggccagccccggcagcggcggcgacctgggcgaagcgatccgcgagcagccggagcaggcccgtctggccctgaccctggccgccgccgagagcgagcgcttcgtccggcagggcaccggcaacgacgaggccggcgcggccagcgccgacgtggtgagcctgacctgcccggtcgccgccggtgaatgcgcgggcccggcggacagcggcgacgccctgctggagcgcaactatcccactggcgcggagttcctcggcgacggcggcgacgtcagcttcagcacccgcggcacgcagaactggacggtggagcggctgctccaggcgcaccgccaactggaggagcgcggctatgtgttcgtcggctaccacggcaccttcctcgaagcggcgcaaagcatcgtcttcggcggggtgcgcgcgcgcagccaggacctcgacgcgatctggcgcggtttctatatcgccggcgatccggcgctggcctacggctacgcccaggaccaggaacccgacgcgcgcggccggatccgcaacggtgccctgctgcgggtctatgtgccgcgctggagtctgccgggcttctaccgcaccggcctgaccctggccgcgccggaggcggcgggcgaggtcgaacggctgatcggccatccgctgccgctgcgcctggacgccatcaccggccccgaggaggaaggcgggcgcgtgaccattctcggctggccgctggccgagcgcaccgtggtgattccctcggcgatccccaccgacccgcgcaacgtcggcggcgacctcgacccgtccagcatccccgacaaggaacaggcgatcagcgccctgccggactacgccagccagcccggcaaaccgccgcgcgaggacttgaagtga

SEQ ID NO: 131 - protein, 650 aa, Artificial Sequence
  source: /note="Description of Artificial Sequence: Synthetic polypeptide"
MKKIWLALAGLVLAFSASAAEEAFDLWNECAKACVLDLKDGVRSSRMSVDPAIADTNGQGVLHYSMVLEGGNDALKLAIDNALSITSDGLTIRLEGGVEPNKPVRYSYTRQARGSWSLNWLVPIGHEKPSNIKVFIHELNAGNQLSHMSPIYTIEMGDELLAKLARDATFFVRAHESNEMQPTLAISHAGVSVVMAQAQPRREKRWSEWASGKVLCLLDPLDGVYNYLAQQRCNLDDTWEGKIYRVLAGNPAKHDLDIKPTVISHRLHFPEGGSLAALTAHQACHLPLEAFTGTWPKDNTSAGVASSPTDIKHRQPRGWEQLEQCGYPVQRLVALYLAARLSWNQVDQVIRNALASPGSGGDLGEAIREQPEQARLALTLAAAESERFVRQGTGNDEAGAASADVVSLTCPVAAGECAGPADSGDALLERNYPTGAEFLGDGGDVSFSTRGTQNWTVERLLQAHRQLEERGYVFVGYHGTFLEAAQSIVFGGVRARSQDLDAIWRGFYIAGDPALAYGYAQDQEPDARGRIRNGALLRVYVPRWSLPGFYRTGLTLAAPEAAGEVERLIGHPLPLRLDAITGPEEEGGRVTILGWPLAERTVVIPSAIPTDPRNVGGDLDPSSIPDKEQAISALPDYASQPGKPPREDLK

SEQ ID NO: 132 - DNA, 2070 bp, Artificial Sequence
  source: /note="Description of Artificial Sequence: Synthetic polynucleotide"
atgaaaaagatttggctggcgctggctggtttagttttagcgtttagcgctagcgccgccgaggaagccttcgacctctggaacgaatgcgccaaggcctgcgtgctcgacctcaaggacggcgtgcgttccagccgcatgagcgtcgacccggccatcgccgacaccaacggccagggcgtgctgcactactccatggtcctggagggcggcaacgacgcgctcaagctggccatcgacaacgccctcagcatcaccagcgacggcctgaccatccgcctcgaaggcggcgtcgagccgaacaagccggtgcgctacagctacacgcgccaggcgcgcggcagttggtcgctgaactggctggtaccgatcggccacgagaagccctcgaacatcaaggtgttcatccacgaactgaacgccggtaaccagctcagccacatgtcgccgatctacaccatcgagatgggcgacgagttgctggcgaagctggcgcgcgatgccaccttcttcgtcagggcgcacgagagcaacgagatgcagccgacgctcgccatcagccatgccggggtcagcgtggtcatggctcaggcccagccgcgccgggaaaagcgctggagcgaatgggccagcggcaaggtgttgtgcctgctcgacccgctggacggggtctacaactacctcgcccagcagcgctgcaacctcgacgatacctgggaaggcaagatctaccgggtgctcgccggcaacccggcgaagcatgacctggacatcaagcccacggtcatcagtcatcgcctgcatttccccgagggcggcagcctggccgcgctgaccgcgcaccaggcctgccacctgccgctggaggccttcactagtgcggtgaccggctattacctgaaccatggtacctggccgaaagataatacgagcgcgggcgttgcaagctctccgaccgacattaaacatcgccagccgcgcggctgggaacaactggagcagtgcggctatccggtgcagcggctggtcgccctctacctggcggcgcgactgtcgtggaaccaggtcgaccaggtgatccgcaacgccctggccagccccggcagcggcggcgacctgggcgaagcgatccgcgagcagccggagcaggcccgtctggccctgaccctggccgccgccgagagcgagcgcttcgtccggcagggcaccggcaacgacgaggccggcgcggccagcgccgacgtggtgagcctgacctgcccggtcgccgccggtgaatgcgcgggcccggcggacagcggcgacgccctgctggagcgcaactatcccactggcgcggagttcctcggcgacggcggcgacgtcagcttcagcacccgcggcacgcagaactggacggtggagcggctgctccaggcgcaccgccaactggaggagcgcggctatgtgttcgtcggctaccacggcaccttcctcgaagcggcgcaaagcatcgtcttcggcggggtgcgcgcgcgcagccaggacctcgacgcgatctggcgcggtttctatatcgccggcgatccggcgctggcctacggctacgcccaggaccaggaacccgacgcgcgcggccggatccgcaacggtgccctgctgcgggtctatgtgccgcgctggagtctgccgggcttctaccgcaccggcctgaccctgagtgcggtgaccggctattacctgaaccatggtacctggccgaaagataatacgagcgcgggcgttgcaagctctccgaccgacattaaagcgccggaggcggcgggcgaggtcgaacggctgatcggccatccgctgccgctgcgcctggacgccatcaccggccccgaggaggaaggcgggcgcgtgaccattctcggctggccgctggccgagcgcaccgtggtgattccctcggcgatccccaccgacccgcgcaacgtcggcggcgacctcgacccgtccagcatccccgacaaggaacaggcgatcagcgccctgccggactacgccagccagcccggcaaaccgccgcgcgaggacttgaagtga

SEQ ID NO: 133 - protein, 689 aa, Artificial Sequence
  source: /note="Description of Artificial Sequence: Synthetic polypeptide"
MKKIWLALAGLVLAFSASAAEEAFDLWNECAKACVLDLKDGVRSSRMSVDPAIADTNGQGVLHYSMVLEGGNDALKLAIDNALSITSDGLTIRLEGGVEPNKPVRYSYTRQARGSWSLNWLVPIGHEKPSNIKVFIHELNAGNQLSHMSPIYTIEMGDELLAKLARDATFFVRAHESNEMQPTLAISHAGVSVVMAQAQPRREKRWSEWASGKVLCLLDPLDGVYNYLAQQRCNLDDTWEGKIYRVLAGNPAKHDLDIKPTVISHRLHFPEGGSLAALTAHQACHLPLEAFTSAVTGYYLNHGTWPKDNTSAGVASSPTDIKHRQPRGWEQLEQCGYPVQRLVALYLAARLSWNQVDQVIRNALASPGSGGDLGEAIREQPEQARLALTLAAAESERFVRQGTGNDEAGAASADVVSLTCPVAAGECAGPADSGDALLERNYPTGAEFLGDGGDVSFSTRGTQNWTVERLLQAHRQLEERGYVFVGYHGTFLEAAQSIVFGGVRARSQDLDAIWRGFYIAGDPALAYGYAQDQEPDARGRIRNGALLRVYVPRWSLPGFYRTGLTLSAVTGYYLNHGTWPKDNTSAGVASSPTDIKAPEAAGEVERLIGHPLPLRLDAITGPEEEGGRVTILGWPLAERTVVIPSAIPTDPRNVGGDLDPSSIPDKEQAISALPDYASQPGKPPREDLK

SEQ ID NO: 134 - DNA, 2088 bp, Artificial Sequence
  source: /note="Description of Artificial Sequence: Synthetic polynucleotide"
atgaaaaagatttggctggcgctggctggtttagttttagcgtttagcgctagcgcctcagccgttaccgagtattacctgaatcacggcgaatggcccggcaacaacacttctgccggcgtggcaacctcctctgaaatcaaagccgaggaagccttcgacctctggaacgaatgcgccaaggcctgcgtgctcgacctcaaggacggcgtgcgttccagccgcatgagcgtcgacccggccatcgccgacaccaacggccagggcgtgctgcactactccatggtcctggagggcggcaacgacgcgctcaagctggccatcgacaacgccctcagcatcaccagcgacggcctgaccatccgcctcgaaggcggcgtcgagccgaacaagccggtgcgctacagctacacgcgccaggcgcgcggcagttggtcgctgaactggctggtaccgatcggccacgagaagccctcgaacatcaaggtgttcatccacgaactgaacgccggtaaccagctcagccacatgtcgccgatctacaccatcgagatgggcgacgagttgctggcgaagctggcgcgcgatgccaccttcttcgtcagggcgcacgagagcaacgagatgcagccgacgctcgccatcagccatgccggggtcagcgtggtcatggctcaggcccagccgcgccgggaaaagcgctggagcgaatgggccagcggcaaggtgttgtgcctgctcgacccgctggacggggtctacaactacctcgcccagcagcgctgcaacctcgacgatacctgggaaggcaagatctaccgggtgctcgccggcaacccggcgaagcatgacctggacatcaagcccacggtcatcagtcatcgcctgcatttccccgagggcggcagcctggccgcgctgaccgcgcaccaggcctgccacctgccgctggaggccttcactcgtcatcgccagccgcgcggctgggaacaactggagcagtgcggctatccggtgcagcggctggtcgccctctacctggcggcgcgactgtcgtggaaccaggtcgaccaggtgatccgcaacgccctggccagccccggcagcggcggcgacctgggcgaagcgatccgcgagcagccggagcaggcccgtctggccctgaccctggccgccgccgagagcgagcgcttcgtccggcagggcaccggcaacgacgaggccggcgcggccagcgccgacgtggtgagcctgacctgcccggtcgccgccggtgaatgcgcgggcccggcggacagcggcgacgccctgctggagcgcaactatcccactggcgcggagttcctcggcgacggcggcgacgtcagcttcagcacccgcggcacgcagaactggacggtggagcggctgctccaggcgcaccgccaactggaggagcgcggctatgtgttcgtcggctaccacggcaccttcctcgaagcggcgcaaagcatcgtcttcggcggggtgcgcgcgcgcagccaggacctcgacgcgatctggcgcggtttctatatcgccggcgatccggcgctggcctacggctacgcccaggaccaggaacccgacgcgcgcggccggatccgcaacggtgccctgctgcgggtctatgtgccgcgctggagtctgccgggcttctaccgcaccggcctgaccctggccgcgccggaggcggcgggcgaggtcgaacggctgatcggccatccgctgccgctgcgcctggacgccatcaccggccccgaggaggaaggcgggcgcgtgaccattctcggctggccgctggccgagcgcaccgtggtgattccctcggcgatccccaccgacccgcgcaacgtcggcggcgacctcgacccgtccagcatccccgacaaggaacaggcgatcagcgccctgccggactacgccagccagcccggcaaaccgccgcgcgaggacttgaagtcagctgttactgaatactaccttaaccacggtgaatggccaggtaacaacacttcagctggtgttgctacttcatcagaaatcaaacaccaccaccaccaccactga

SEQ ID NO: 135 - protein, 695 aa, Artificial Sequence
  source: /note="Description of Artificial Sequence: Synthetic polypeptide"
MKKIWLALAGLVLAFSASASAVTEYYLNHGEWPGNNTSAGVATSSEIKAEEAFDLWNECAKACVLDLKDGVRSSRMSVDPAIADTNGQGVLHYSMVLEGGNDALKLAIDNALSITSDGLTIRLEGGVEPNKPVRYSYTRQARGSWSLNWLVPIGHEKPSNIKVFIHELNAGNQLSHMSPIYTIEMGDELLAKLARDATFFVRAHESNEMQPTLAISHAGVSVVMAQAQPRREKRWSEWASGKVLCLLDPLDGVYNYLAQQRCNLDDTWEGKIYRVLAGNPAKHDLDIKPTVISHRLHFPEGGSLAALTAHQACHLPLEAFTRHRQPRGWEQLEQCGYPVQRLVALYLAARLSWNQVDQVIRNALASPGSGGDLGEAIREQPEQARLALTLAAAESERFVRQGTGNDEAGAASADVVSLTCPVAAGECAGPADSGDALLERNYPTGAEFLGDGGDVSFSTRGTQNWTVERLLQAHRQLEERGYVFVGYHGTFLEAAQSIVFGGVRARSQDLDAIWRGFYIAGDPALAYGYAQDQEPDARGRIRNGALLRVYVPRWSLPGFYRTGLTLAAPEAAGEVERLIGHPLPLRLDAITGPEEEGGRVTILGWPLAERTVVIPSAIPTDPRNVGGDLDPSSIPDKEQAISALPDYASQPGKPPREDLKSAVTEYYLNHGEWPGNNTSAGVATSSEIKHHHHHH

SEQ ID NO: 136 - protein, 676 aa, Artificial Sequence
  source: /note="Description of Artificial Sequence: Synthetic polypeptide"
SAVTEYYLNHGEWPGNNTSAGVATSSEIKAEEAFDLWNECAKACVLDLKDGVRSSRMSVDPAIADTNGQGVLHYSMVLEGGNDALKLAIDNALSITSDGLTIRLEGGVEPNKPVRYSYTRQARGSWSLNWLVPIGHEKPSNIKVFIHELNAGNQLSHMSPIYTIEMGDELLAKLARDATFFVRAHESNEMQPTLAISHAGVSVVMAQAQPRREKRWSEWASGKVLCLLDPLDGVYNYLAQQRCNLDDTWEGKIYRVLAGNPAKHDLDIKPTVISHRLHFPEGGSLAALTAHQACHLPLEAFTRHRQPRGWEQLEQCGYPVQRLVALYLAARLSWNQVDQVIRNALASPGSGGDLGEAIREQPEQARLALTLAAAESERFVRQGTGNDEAGAASADVVSLTCPVAAGECAGPADSGDALLERNYPTGAEFLGDGGDVSFSTRGTQNWTVERLLQAHRQLEERGYVFVGYHGTFLEAAQSIVFGGVRARSQDLDAIWRGFYIAGDPALAYGYAQDQEPDARGRIRNGALLRVYVPRWSLPGFYRTGLTLAAPEAAGEVERLIGHPLPLRLDAITGPEEEGGRVTILGWPLAERTVVIPSAIPTDPRNVGGDLDPSSIPDKEQAISALPDYASQPGKPPREDLKSAVTEYYLNHGEWPGNNTSAGVATSSEIKHHHHHH

SEQ ID NO: 137 - protein, 163 aa, Neisseria meningitidis
FTLIELMIVIAIVGILAAVALPAYQDYTARAQVSEAILLAEGQKSAVTEYYLNHGEWPGNNTSAGVATSSEIKGKYVKSVEVKNGVVTAQMASSNVNNEIKGKKLSLWAKRQNGSVKWFCGQPVTRDKAKAANDDVTAAAAANGKKIDTKHLPSTCRDASDAS

SEQ ID NO: 138 - protein, 170 aa, Neisseria meningitidis
MNTLQKGFTLIELMIVIAIVGILAAVALPAYQDYTARAQVSEAILLAEGQKSAVTEYYLNHGEWPGNNTSAGVATSSEIKGKYVKSVEVKNGVVTAQMASSNVNNEIKGKKLSLWAKRQNGSVKWFCGQPVTRDKAKAANDDVTAAAAANGKKIDTKHLPSTCRDASDAS

SEQ ID NO: 139 - DNA, 513 bp, Neisseria meningitidis
atgaacacccttcaaaaaggttttacccttatcgagctgatgattgtgattgccatcgtcggcattttggcggcagtcgcccttcctgcttatcaagactacacagcccgcgcacaagtttccgaagccattcttttggccgaaggtcaaaaatcagccgttaccgagtattacctgaatcacggcgaatggcccggcaacaacacttctgccggcgtggcaacctcctctgaaatcaaaggcaaatatgttaaaagcgttgaagtcaaaaacggcgtcgttaccgcccaaatggcttcaagcaacgtaaacaacgaaatcaaaggcaaaaaactctccctgtgggccaagcgtcaaaacggttcggtaaaatggttctgcggacagccggttacgcgcgacaaagccaaagccgccaacgacgacgttaccgccgccgccgccgccaacggtaagaagattgacaccaagcacctgccgtcaacctgccgcgacgcaagtgatgccagctaa

SEQ ID NO: 140 - protein, 29 aa, Neisseria meningitidis
SAVTEYYLNHGEWPGNNTSAGVATSSEIK

SEQ ID NO: 141 - protein, 19 aa, Neisseria meningitidis
GEWPGNNTSAGVATSSEIK

SEQ ID NO: 142 - protein, 12 aa, Neisseria meningitidis
GEWPGNNTSAGV

SEQ ID NO: 143 - protein, 98 aa, Neisseria gonorrhoeae
MNTLQKGFTLIELMIVIAIVGILAAVALPAYQDYTARAQVSEAILLAEGQKSAVTGYYLNHGTWPKDNTSAGVASSPTDIKGKYVQSVTVATASLPPK

SEQ ID NO: 144 - DNA, 297 bp, Neisseria gonorrhoeae
atgaatacccttcaaaaaggctttacccttatcgagctgatgattgtgatcgccatcgtcggcattttggcggcagtcgcccttcccgcctaccaagactacaccgcccgcgcgcaagtttccgaagccatccttttggccgaaggtcaaaaatcagccgttaccgggtattacctgaatcacggcacatggccgaaagacaacacttctgccggcgtggcatcctcccccaccgacatcaaaggcaaatatgttcaaagcgttacggtcgcaacggcgtcgttaccgccgaaatga

SEQ ID NO: 145 - protein, 30 aa, Neisseria gonorrhoeae
SAVTGYYLNHGTWPKDNTSAGVASSPTDIK

SEQ ID NO: 146 - protein, 20 aa, Neisseria gonorrhoeae
GTWPKDNTSAGVASSPTDIK

SEQ ID NO: 147 - protein, 12 aa, Neisseria gonorrhoeae
GTWPKDNTSAGV

SEQ ID NO: 148 - protein, 148 aa, Neisseria lactamica
MKAIQKGFTLIELMIVIAIVGILAAVALPAYQDYTARAQMSEALTLAEGQKAAVVEYYSDNGTFPAQNASAGIATASAITGKYVAKVEVTGDATSATITSTMKSSGVNNDIKGKTLVLVGKQNSGSFSWECKKGTVDDKFLPSSCRAK

SEQ ID NO: 149 - DNA, 447 bp, Neisseria lactamica
atgaaagcaatccaaaaaggtttcaccctgatcgagctgatgatcgtcatcgccatcgtcggtatcttggcagccgtcgccctgcccgcataccaagactacaccgcgcgcgcccaaatgtccgaagccctgactttggctgaaggtcaaaaagccgcagtggtcgagtattattccgacaacggtacattccctgcccaaaatgcctctgcaggtattgctactgcttctgcaattacaggtaaatatgtggctaaagtagaagttacaggtgatgctacctctgccaccattacctctactatgaaatcttccggtgtaaataacgacatcaaaggtaaaactttggtactcgtcggcaaacaaaactccggctcgttctcttgggaatgtaaaaaaggtactgtggacgacaaattcctgccgtcttcctgccgcgccaaataa

SEQ ID NO: 150 - protein, 35 aa, Neisseria lactamica
AAVVEYYSDNGTFPAQNASAGIATASAITGKYVAK

SEQ ID NO: 151 - protein, 12 aa, Neisseria lactamica
GTFPAQNASAGI

SEQ ID NO: 152 - DNA, 567 bp, Neisseria elongata
atgaaagcaatgcaaaaaggtttcaccctgatcgagttgatgatcgtaatcgccattatcggtattttggctgctatcgccctgccggcttaccaagactacactgtacgttctaaagtttccgaagctttgatcgctgcttcttctccgaagtctgctctgtctgaagctttccaaactgacggcattaccggtatgactgcagctgccaaagcatttaacaaaaccgctgctgctggtggtggtgctggtggtgctgctgctgctggtactcaacatgcatccaaatatgttaaaagcgtgaaagttactgaagctagcccatgggatattaccgtagccatttccgctacagaggcaaacggtattccgactggtttagacggaaatacaatcagactgttcccgttggttaataaagcggttccggcagcaacttctaccggcgcgattgactgggcttgtgcttctgcagcaaaagaaactgcggataaacgtttcggtactggttctggcgttgctgttggtaccttgcctgccaaatacgctccttctgagtgcaaataa

SEQ ID NO: 153 - protein, 188 aa, Neisseria elongata
MKAMQKGFTLIELMIVIAIIGILAAIALPAYQDYTVRSKVSEALIAASSPKSALSEAFQTDGITGMTAAAKAFNKTAAAGGGAGGAAAAGTQHASKYVKSVKVTEASPWDITVAISATEANGIPTGLDGNTIRLFPLVNKAVPAATSTGAIDWACASAAKETADKRFGTGSGVAVGTLPAKYAPSECK

SEQ ID NO: 154 - protein, 45 aa, Neisseria elongata
SALSEAFQTDGITGMTAAAKAFNKTAAAGGGAGGAAAAGTQHASK

SEQ ID NO: 155 - DNA, 558 bp, Neisseria bacilliformis
atgattggatttaaaatgaaagcaatgcaaaaaggtttcaccctgatcgaactgatgatcgtcgtcgccattgtcggcatcttggccgccatcgccctgcccgcctaccaagactacaccgtccgcagccgcgttaccgagggtctgaacttggccgagtctgccaaaaccctgatttccaccgacgccacttccattaatgacttggacatcgccgtcgccgcatggaaccgtcaagccaacaataccggtgccaattccaaatacgttaccagcgtaaaaatggccgctgccggcgacaaccggggcgagctgaccatcacattcgatgccgccaaagtcggcgtgccgaccaccgaaaacaccctcatcctcaccccgtgggtcaacaacggcagcgccaaaacccgtttggccaaagcccttactgacggaattgccggcaacctcgactggtcctgccaatcaaccaccagcgcagccgcagtcaaacaaatcggccaagccggcacactcggcaaactgccggaaaaatacgctccttcgcaatgccgctaa

SEQ ID NO: 156 - protein, 185 aa, Neisseria bacilliformis
MIGFKMKAMQKGFTLIELMIVVAIVGILAAIALPAYQDYTVRSRVTEGLNLAESAKTLISTDATSINDLDIAVAAWNRQANNTGANSKYVTSVKMAAAGDNRGELTITFDAAKVGVPTTENTLILTPWVNNGSAKTRLAKALTDGIAGNLDWSCQSTTSAAAVKQIGQAGTLGKLPEKYAPSQCR

SEQ ID NO: 157 - protein, 37 aa, Neisseria bacilliformis
TLISTDATSINDLDIAVAAWNRQANNTGANSKYVTSV

SEQ ID NO: 158 - DNA, 474 bp, Neisseria mucosa
atgaaagcaatccaaaaaggtttcaccctgatcgaattgatgatcgtcgtagcaattatcggtatcttggccgctatcgccctgcctatgtacggcgactacactgcccgtgcacaagcaactgaaggctacgaactcttgggcggtatgaaaacgcctttggttgaggcagtagctgcaagcagtaatgctattgcttgtaaaaataatgccccttggtacacctcttccgtgcaaagtggtaaatatgtaagtgctatcgaacctgcagtcaagggcgaaacttgtgtactgactgctactttcaaagcagcttctgccggcgtcaacgacaaagtggctgagaaacacatcgcgatgaccctgactccaaaaactggtgcttggtcttgtggtactgacttggataaaaacgtagcgcctgctgcttgtcgtgatgcattggctgccgctcctgcgaatcccgctcaataa

SEQ ID NO: 159 - protein, 157 aa, Neisseria mucosa
MKAIQKGFTLIELMIVVAIIGILAAIALPMYGDYTARAQATEGYELLGGMKTPLVEAVAASSNAIACKNNAPWYTSSVQSGKYVSAIEPAVKGETCVLTATFKAASAGVNDKVAEKHIAMTLTPKTGAWSCGTDLDKNVAPAACRDALAAAPANPAQ

SEQ ID NO: 160 - protein, 41 aa, Neisseria mucosa
TPLVEAVAASSNAIACKNNAPWYTSSVQSGKYVSAIEPAVK

SEQ ID NO: 161 - DNA, 432 bp, Neisseria shayeganii
atgttgaaacaagtacaaaaaggttttaccttgatcgagctgatgattgtgatcgccattatcggtattctggccgccatcgccctgcccgcttaccaagactacatcgcccgctcacaaatgactgaagcgtttaacttggctggcggccaaaaaggtgcggttaccgagtatgaggcagataaaggtgtattcccgacaagtaatgcttctgcaggtgttgcagcagcagcagatattaacggtaaatatgttgagaaagtagaaatcactactgacggtaaaattgttgctaccatgagaaatagtggtacttctgccggcatccaaggtaaaactttgactttgacaccgaccaagcaaagtggctcttacacttgggcgtgcacatcttctgcaaatagcaaatatttacctgctgcttgccgctaa

SEQ ID NO: 162 - protein, 143 aa, Neisseria shayeganii
MLKQVQKGFTLIELMIVIAIIGILAAIALPAYQDYIARSQMTEAFNLAGGQKGAVTEYEADKGVFPTSNASAGVAAAADINGKYVEKVEITTDGKIVATMRNSGTSAGIQGKTLTLTPTKQSGSYTWACTSSANSKYLPAACR

SEQ ID NO: 163 - protein, 31 aa, Neisseria shayeganii
GAVTEYEADKGVFPTSNASAGVAAAADINGK

SEQ ID NO: 164 - protein, 12 aa, Neisseria shayeganii
GVFPTSNASAGV

SEQ ID NO: 165 - protein, 147 aa, Neisseria lactamica
MKAIQKGFTLIELMIVIAIVGILAAVALPAYQDYTARAQMSEALTLAEGQKAAVVEYYSDNGTFPTTNASAGIANASTIKGKYVQKVEVNGDATSATITSTMNASGVNKDISGKTLLLVGKQNSGSFEWTCKAGTVDTKFLPSSCRK

SEQ ID NO: 166 - protein, 153 aa, Neisseria gonorrhoeae
MNTLQKGFTLIELMIVIAIVGILAAVALPAYQDYTARAQVSEAILLAEGQKSAVTEYYLNNGEWPADNGAAGVASASTIKGKYVESVTVTNGVVTAEMKSDGVNKEIKGKKLSLWGRRENGSVKWFCGQPVTRNDAADNDDVAKDDAADNDDV

SEQ ID NO: 167 - protein, 206 aa, Neisseria cinerea
MARFWHAVCWKKDKPKGKVKKTSGQIHYGFANFLADAEKHFIFHLNFKLRSYPMKAIQKGFTLIELMIVIAILGILAVIAFPAYQDYTIRAKVSEGLNLAAPAKLAVAETAASLGGLTKVTTDNTGYKFSATKYVSSIAIANGGQITITTKDTGADENPVFDLKPTQTKLEDPIEWACTYSKGSPKHVPANCRTKAAAAPAAGTSH

SEQ ID NO: 168 - protein, 207 aa, Neisseria cinerea
MPSEAVSDGIFYFGARLGFPFVLPCIASSCREPDGGGKVGGGGNIDYNHADKLTIKNINMKNKPYGFTLIELMIVTAILGILTMFALPAYQDYAARAQVAETYYLLDELKTEIGIYASIYNHLPDAVEVSPSGGVGSAAARMGGTYILHGGVTVEADTAKISVPFDKGYHKGKILTLSPTRDSESGIITWVCGGTIEPRSLPAVCRR

SEQ ID NO: 169 - protein, 158 aa, Neisseria mucosa
MKAIQKGFTLIELMIVIAILGILAVIALPAYQDYTIRAKVSEGLGLAEPAKLAVAETAAALDGLSSVTAYTTGTTDKAQMGNTGYKFVPTKYVKSINIAKGGVITVTTQATGAKEDPVFTLTPSQNGATAGTSDSEAPLSWTCKFSGGEPKHVPANCR

SEQ ID NO: 170 - protein, 157 aa, Neisseria mucosa
MNTPFQAQKGFTLIELMIVIAILGILVVVAIPTYQNYIGRAQASEALYLADDLKTEISIASAVNNRLPNAEDVSKQGAIGVTAQRIGGTYIQNGGVTVEADTGKISIPFDKGQNKGKVLTLTPYRINNDSTWLLNWQCGGTLDPMMIPAMCRDNSNG

SEQ ID NO: 171 - protein, 156 aa, Neisseria flavescens
MKAIQKGFTLIELMIVIAILGILAVVALPAYQDYTVRAKISEGLGLAEPAKLAVAETSAALGGLNKITTTNTGYTFPTGGTKYVSSIAIAAGSGEITVTTKDTGSTTDPVFTLTPNQAHPEDPITWECKSKGGQPKHLPANCRETDTGTSSTGTTS

SEQ ID NO: 172 - protein, 157 aa, Neisseria mucosa; identical to SEQ ID NO: 159

SEQ ID NO: 173 - protein, 146 aa, Neisseria mucosa
MKQQGFTITELMIVVAILGILAAIALPLFGNYTAKAQATEGHEILAGLKSPLVEAISTEGINACDTTKPWFTSSVHTGNFVNDVALEKTETQCLLTVTFKSGGVNDKITNKKINIRYTVGTGVWECGTDVDKELRTASCQGDLLSL

SEQ ID NO: 174 - protein, 154 aa, Neisseria sp.
MKAMQKGFTLIELMIVVAIIGILAAIALPMYGDYTARAQATEGYELLGGLKTPLVEAVAASSNAVACKGTTGANDNQPWFQSAVTTGKYVDNVVAAVDGSNCGLTATFKAASAGVNDKVAGHKIVMTLNPSDGKWTCKSDLDKNVSPAACRDAI

SEQ ID NO: 175 - protein, 152 aa, Neisseria sp.
MMNTSNMNANGFTIIELMIVVALIGIISALALPLFGNYSARAQASEGQSLLAGLKSPLVEAIAAEGIGACDTSKPWFTNSVSQGHYVNDVAVQKNTTQCLLTVTFKSANVNDKIIGKKINIRYTTGSGVWECGTDLPSDIAPSSCPGTLLTL

SEQ ID NO: 176 - protein, 151 aa, Neisseria arctica
MKAIQKGFTLIELMIVVAIIGILAVVALPMYQDYSAKAQWSEAPSISDGVKKDIALHYGLNNTCLTNGEGGIAAEDAITGKYVDSVTAGGTAADDGSGGCTVTVTFKTEGVNAKLSGKTVTYTLDQSDNKSEWNCSSNVDSTILPTSCSAD

SEQ ID NO: 177 - protein, 143 aa, Neisseria shayeganii; identical to SEQ ID NO: 162

SEQ ID NO: 178 - protein, 164 aa, Neisseria shayeganii
MDRFVSSPLNGFKTHGLKGFTLIELMIVIAIIGVLAAMALPAYQVYVARAQVSEALNLMNGMKSAVAENYHSSATCADNQNSDHFGVAHQNHILGNHVQRIRTQTSSQAGETCEMVATFRNSNVADALKGKTLILSLRVSSGSDVWTCRSNDLNSLYLPSVCRP

SEQ ID NO: 179 - protein, 143 aa, Neisseria shayeganii; identical to SEQ ID NO: 162

SEQ ID NO: 180 - protein, 164 aa, Neisseria shayeganii; identical to SEQ ID NO: 178

SEQ ID NO: 181 - protein, 166 aa, Neisseria sp.
MKAVQKGFTLIELMIVIAIIGILAAIALPMYQNYIARSQVTRVMGEAGNLKTVVETCMLNGRTTVARLTNTNAATACVIGATGSSLLNGAAQTGENIPAGTGVPQVAITGNNTATIIATFGNNAAATLTGQRVQWARDNTGTWTCSTNVSGDFRPAGCTATLTAQR

SEQ ID NO: 182 - protein, 165 aa, Neisseria sp.
MIKNRYNSLGFSLIELMIVLAIIGILSAISIPIFQNYVAKSQLTRVVYELSSAKAGIDTILSQGGFPTVDPTQNRQPYTNGAVYEYIGLNGSNPTSNIVSLATITNNGNSFSGLEATLGGDVSTLLTGTVVRLERNPMNGTWQCQIILPPNTNKTNLQINSCIFS

SEQ ID NO: 183 - protein, 170 aa, Neisseria wadsworthii
MKAVQKGFTLIELMIVIAIIGILAAIALPMYQNYIARSQVTRAMGEAGNLKTVVETCMLNGQNVVGNGAGQCALGATGSNILRGNAQSGETLAAGTGVPQVTINAGANTATIVATFGNNAAAALVPGGNNGGRTLTWSRNNQGTWTCSTTVDAAYAPAGCPVAANNARRP

SEQ ID NO: 184 - protein, 167 aa, Neisseria wadsworthii
MAKIHQQQNGFTLIELMIVLIILGVLSAISLPIFQNYVAKSQLTRAVYEISSTKASIDTILSQGGYPTVDPDQDRQNYPNGSIYEYIGLNGNNPTSNIVSLATITNNNNAFGGLEATLGGDVSTVLTGTIIRLTRNPINGTWQCQIVLPPNTSTLNLNVNGCNFVQS

SEQ ID NO: 185 - protein, 188 aa, Neisseria elongata
MRLFLIIKKVFKMNSLPNQQGFTLIELMIVIAIIGILAAIAIPQYSIYTTRAKLSEGLVAASHRKTAVTEAYLNNGMAGVTALASSTNTAPTADKQSKFIKSSNIDAATGAIVILLADDEESTLPDDAKGKTLVFKPYIGNADLPTAVSRGKMDWACASATNTTATKRGFTNMPQGTLPSKYAPPECK

SEQ ID NO: 186 - protein, 188 aa, Neisseria elongata; identical to SEQ ID NO: 153

SEQ ID NO: 187 - protein, 182 aa, Neisseria bacilliformis
MNMKAMQKGFTLIELMIVVAIIGILAAIALPAYQDYTVRSRITEGLNLAESAKTMLGTDATSVNDLDIAVAAWNRQANGTGATSKYVKSVLMNTTGDTRGELTVTFDGAAVGVKTGEDTLVLTPWINDGTNKTRLAKALTDGVAGNLDWSCQSATNATATKQIGAAGTAGTVLEKYAPSQCR

SEQ ID NO: 188 - protein, 185 aa, Neisseria bacilliformis; identical to SEQ ID NO: 156

SEQ ID NO: 189 - protein, 186 aa, Neisseria bacilliformis
MDVKLNTGMNKASGFTLIELMIVVAIIGILAALALPLYQDFNIRAKVSEGLLLAEDLKNEIAIYGRTNSSELESTIKSWNKRSASKGALTKYVDSVLADTKNGVITVSYNAAQIGVAPNQNTLVITPMVKNDSGVYQTIDVAFASGNTNAVDWACSSDTHATADKSGMTAAKSGTLSNKYAPSICR

SEQ ID NO: 190 - protein, 168 aa, Neisseria sp.
MKAMQKGFTLIELMIVIAIIGILAAIAIPQYQNYITRSQASRIMGETSQIKTAVETCILDGRTAVVIHSGTPAANAIATTCVTGDTQSNLLGAATEKAVGFPTVTINDNGTASITATFGTNAATALKGKTLGWGRTSEGTWSCSTSIDEKYRPTGCSATAAAAATPKP

SEQ ID NO: 191 - protein, 164 aa, Neisseria sp.
MKNANKTKGFTLIELMIVIAIIGILAAIAIPQYQNYIVRTQLNRAYYEVKSTVTSIETVLGNGNFPTLRPEEDNTVADGVKREYIGLNSTIPQSNIISSADITKDASKNFKDISIVLGKNATNTLHGTTITLTRDAEGGWTCSIKKPNGSSVNLPSINSLCTLS

SEQ ID NO: 192 - protein, 180 aa, Neisseria sp.
MKAMQKGFTLIELMIVVAIIGILAAIALPAYQDYTVRTRVTEGLSLAEAAKQMIATEGSAAAADLNRVVATWNAQANNTGANSKYVDSVLMTADSGLITITYDAAATGVAAAENTITLTPWVRSGQANGAGESLAAAIAAGRTGALDWGCSSNTTATAAANGITTTAATLQAKYAPAQCR

SEQ ID NO: 193 - protein, 184 aa, Neisseria sp.
MKFFNKGFVKGFTLIELMVVVAIIGVLAALALPAYQDFVIRTRIAEGIGMIAPFKSEIVIDGRTSATYLNATITEMNTRNGNTGANSKYVDSIQADPVSGVITISYNASAVGLNANANTLVFTPLVKKTGAAGFDTLPQAFAAANMGIIVWACASDTHLNADEHGFLPIQTGTLPSKFAPAECR

SEQ ID NO: 194 - protein, 162 aa, Neisseria weaveri
MKALQKGFTLIELMIVIAIIGILAVIALPAYQDYTARAQVSEAFSLMEGQKSAVTEFYADKGAWPKGNSDAGVAAETAISGKYVAQVKVTENFITATFKSSGVNDDIKGTSVAIQADASGGGSFKWTCVKPAENTPAKKAAVDKQTTVMSKFLPSVCRDSTT

SEQ ID NO: 195 - protein, 153 aa, Neisseria macacae
MKAIQKGFTLIELMIVVAIIGILAAIALPMYGDYTARAQATEGYELLGGMKTPLVEAVAASSNANACKNDAAWYTSSVRTGKYVSGVVPAAAGTGDAATCALTATFKAATEGVNDKVATKTITMTLTPATGAWACTTNLADNVAPAACRAAKK

SEQ ID NO: 196 - protein, 179 aa, Neisseria macacae
MNNKARSGGLFYHLFKQIGQTDSFSTHFIKGRRMKQQGFTITELMIVVAILGILAAIALPLFGNYTAKAQATEGHEILAGLKSPLVEAISTEGINACDATKPWFTSSVHTGNFVNDVALKKTETQCLLTVTFKSSGVNDKITNKKINIRYTVGTGVWECGTNVDKELRTASCQGDLLSL

SEQ ID NO: 197 - DNA, 1122 bp, Artificial Sequence
  source: /note="Description of Artificial Sequence: Synthetic polynucleotide"
atgaaatacctgctgccgaccgctgctgctggtctgctgctcctcgctgcccagccggcgatggccatgcatatgagcaaagaagaagcaccaaaaatacaaatgccgcctcaacctgtaacaaccatgagtgctaaatctgaagatttaccacttagttttacttaccctgctaaacttgtcagtgattatgatgtcattataaaacctcaagttagcggcgtaatagtaaataaactttttaaagctggagataaggtaaaaaaaggacaaacattatttattatagaacaagataaatttaaagctagtgttgattcagcttacggacaagctttaatggctaaggcaactttcgaaaatgcaagcaaggattttaatcgttctaaagctctttttagcaaaagtgcaatctctcaaaaagaatacgactcttctcttgctacatttaacaattcaaaagctagtctagcaagtgctagagcacagcttgcaaatgcaagaattgatctagatcataccgagataaaagctccttttgatggtactataggagatgctttagttaatataggagattatgtaagtgcttcaacaactgaactagttagagttacaaatttaaatcctatttacgcagatttctttatttcagatacagataaactaaatttagtccgcaatactcaaagtggaaaatgggatttagacagcattcatgcaaatttaaatcttaatggagaaaccgttcaaggcaaactttattttattgattcggttatagatgctaatagtggaacagtaaaagccaaagccgtatttgataacaataactcaacacttttaccgggtgcttttgcaacaattacttcagaaggttttatacaaaaaaatggctttaaagtgcctcaaataggtgttaaacaagatcaaaatgatgtttatgttcttcttgttaaaaatggaaaagtagaaaaatcttctgtacatataagctaccaaaacaatgaatacgccattattgacaaaggattgcaaaatggcgataaaatcattttagataactttaaaaaaattcaagttggtagcgaagttaaagaaattggagcacaactcgagtga

SEQ ID NO: 198 - protein, 373 aa, Artificial Sequence
  source: /note="Description of Artificial Sequence: Synthetic polypeptide"
MKYLLPTAAAGLLLLAAQPAMAMHMSKEEAPKIQMPPQPVTTMSAKSEDLPLSFTYPAKLVSDYDVIIKPQVSGVIVNKLFKAGDKVKKGQTLFIIEQDKFKASVDSAYGQALMAKATFENASKDFNRSKALFSKSAISQKEYDSSLATFNNSKASLASARAQLANARIDLDHTEIKAPFDGTIGDALVNIGDYVSASTTELVRVTNLNPIYADFFISDTDKLNLVRNTQSGKWDLDSIHANLNLNGETVQGKLYFIDSVIDANSGTVKAKAVFDNNNSTLLPGAFATITSEGFIQKNGFKVPQIGVKQDQNDVYVLLVKNGKVEKSSVHISYQNNEYAIIDKGLQNGDKIILDNFKKIQVGSEVKEIGAQLE

SEQ ID NO: 199 - protein, 408 aa, Artificial Sequence
  source: /note="Description of Artificial Sequence: Synthetic polypeptide"
MKYLLPTAAAGLLLLAAQPAMAMHMSKEEAPKIQMPPQPVTTMSAKSEDLPLSFTYPAKLVSDYDVIIKPQVSGVIVNKLFKAGDKVKKGQTLFIIEQDKFKASVDSAYGQALMAKATFENASKDFLRSKALFSKSAISQKEYDSSLATFNNSKASLASARAQLANARIDLDHTEIKAPFDGTIGDALVNIGDYVSASTTELVRVTNLNPIYADFFISDTDKLNLVRNTQSGKWDLDSIHANLNLNGETVQGKLYFIDSVIDANSGTVKAKAVFDNNNSTLLPGAFATITSEGFIQKNGFKVPQIGVKQDQNDVYVLLVKNGKVEKSSVHISYQNNEYAIIDKGLQNGDKIILDNFKKIQVGSEVKEIGAQLESAVTEYYLNHGEWPGNNTSAGVATSSEIKHHHHHH

SEQ ID NO: 200 - DNA, 960 bp, Artificial Sequence
  source: /note="Description of Artificial Sequence: Synthetic polynucleotide"
atgtcattcaagaagattatcaaggcattcgttattatggcggcactggtgtcggtccaagcccacgcagcggaagttcgcaacctgaacgcggcccgtgaactgtttctggatgaactgctggcagctagcgcggccccggcatctgccgaacaggaagaactgctggccctgctgcgtagtgaacgcattgtgctggcacatgctggccagccgctgtccgaagcacaagttctgaaagcgctggcctggctgctggcagctaatccgagcgcaccgccgggccaaggtctcgaggttctgcgtgaagtcctgcaagcccgtcgccaaccgggtgcccagtgggatctgcgtgaatttctggttagcgcatatttctctctgcacggccgcctggatgaagacgtgatcggtgtttacaaagatgttctgcaaacccaagacggcaaacgcaaagccctgctggatgaactgaaagcgctgacggccgaactgaaagtctatagtgtgattcagtcccaaatcaacgcagctctgagcgcaaaacagggtattcgtattgatgctggcggtattgatctggtggatccgaccctgtatggctacgcggtgggtgatccgcgctggaaagacagcccggaatatgccctgctgtctaatctggatacgttttcaggcaaactgtcgatcaaagacttcctgagtggttccccgaaacagagtggcgaactgaaaggtctgtccgatgaatacccgtttgaaaaagacaacaatccggtgggcaacttcgccaccacggtttcagatcgttcgcgcccgctgaacgacaaagtgaatgaaaaaaccacgctgctgaacgataccagctctcgttataatagcgcagttgaagctctgaaccgctttattcagaaatacgactcggtcctgcgtgacatcctgagcgccatcggttcctag

SEQ ID NO: 201 - protein, 319 aa, Artificial Sequence
  source: /note="Description of Artificial Sequence: Synthetic polypeptide"
MSFKKIIKAFVIMAALVSVQAHAAEVRNLNAARELFLDELLAASAAPASAEQEELLALLRSERIVLAHAGQPLSEAQVLKALAWLLAANPSAPPGQGLEVLREVLQARRQPGAQWDLREFLVSAYFSLHGRLDEDVIGVYKDVLQTQDGKRKALLDELKALTAELKVYSVIQSQINAALSAKQGIRIDAGGIDLVDPTLYGYAVGDPRWKDSPEYALLSNLDTFSGKLSIKDFLSGSPKQSGELKGLSDEYPFEKDNNPVGNFATTVSDRSRPLNDKVNEKTTLLNDTSSRYNSAVEALNRFIQKYDSVLRDILSAIGS

SEQ ID NO: 202 - protein, 354 aa, Artificial Sequence
  source: /note="Description of Artificial Sequence: Synthetic polypeptide"
MSFKKIIKAFVIMAALVSVQAHAAEVRNLNAARELFLDELLAASAAPASAEQEELLALLRSERIVLAHAGQPLSEAQVLKALAWLLAANPSAPPGQGLEVLREVLQARRQPGAQWDLREFLVSAYFSLHGRLDEDVIGVYKDVLQTQDGKRKALLDELKALTAELKVYSVIQSQINAALSAKQGIRIDAGGIDLVDPTLYGYAVGDPRWKDSPEYALLSNLDTFSGKLSIKDFLSGSPKQSGELKGLSDEYPFEKDNNPVGNFATTVSDRSRPLNDKVNEKTTLLNDTSSRYNSAVEALNRFIQKYDSVLRDILSAIGSSAVTEYYLNHGEWPGNNTSAGVATSSEIKHHHHHH

SEQ ID NO: 203 - DNA, 1776 bp, Artificial Sequence
  source: /note="Description of Artificial Sequence: Synthetic polynucleotide"
atgaaaaaaatctggctggctctggcaggtctggttctggcgttctccgcctctgctggcgcagatgacgttgttgacagcagcaaatccttcgttatggaaaacttctcctcttatcacggcaccaaaccgggctatgtggacagcattcagaaaggtatccaaaaaccgaaatctggcacgcagggtaactacgatgacgattggaaagaattctacagcaccgacaacaaatatgatgcggccggttactcagttgacaacgaaaatccgctgtcgggcaaagccggcggtgtggttaaagtcacgtatccgggcctgaccaaagtcctggccctgaaagtggataatgcagaaaccatcaaaaaagaactgggtctgagcctgacggaaccgctgatggaacaggttggcaccgaagaatttatcaaacgcttcggcgatggtgccagtcgtgtcgtgctgtccctgccgttcgcagaaggtagctctagtgtcgaatatattaacaattgggaacaagcgaaagccctgtccgtggaactggaaatcaactttgaaacccgcggcaaacgtggtcaggatgcgatgtatgaatacatggcacaagcttgcgcgggtaatcgcgttcgtcgcagcgtcggctcctcactgtcttgtatcaacctggactgggatgttatccgtgataaaaccaaaacgaaaatcgaaagtctgaaagaacacggcccgatcaaaaacaaaatgagcgaatctccgaataaaacggtgtccgaagaaaaagctaaacagtatctggaagaattccaccaaaccgcactggaacatccggaactgtcagaactgaaaaccgtcacgggtaccaacccggtgtttgccggcgcaaattacgcagcttgggctgtgaacgttgcgcaagtgattgactcggaaacggccgataatctggaaaaaaccacggcggccctgagtattctgccgggcatcggttccgtgatgggtattgccgatggcgcagttcatcacaacaccgaagaaattgtcgcccagtctatcgcactgtcgagcctgatggttgctcaagcgattccgctggttggcgaactggttgatatcggctttgcagcttacaacttcgtggaaagtatcatcaacctgtttcaggttgtccataactcatataatcgcccggcctactcgccgggtcacaaaacccaaccgttcctgcatgacggctacgcggttagctggaatacggtcgaagattctattatccgtaccggctttcagggtgaatctggccacgacattaaaatcacggctgaaaacaccccgctgccgattgccggtgttctgctgccgaccatcccgggtaaactggatgtgaataaatcaaaaacccatatctcggttaacggtcgcaaaattcgtatgcgctgccgtgcgatcgacggcgatgtgaccttctgtcgtccgaaaagcccggtctatgtgggcaacggtgttcatgctaatctgcacgtcgcgtttcatcgctctagttccgaaaaaatccacagtaacgaaatctcatcggactccattggtgtgctgggctaccagaaaacggtggatcataccaaagttaatagcaaactgtcactgttcttcgaaatcaaatcaggctcgtcagccgttaccgagtattacctgaatcacggcgaatggcccggcaacaacacttctgccggcgtggcaacctcctctgaaatcaaacatcatcatcatcaccactaa

SEQ ID NO: 204 - protein, 591 aa, Artificial Sequence
  source: /note="Description of Artificial Sequence: Synthetic polypeptide"
MKKIWLALAGLVLAFSASAGADDVVDSSKSFVMENFSSYHGTKPGYVDSIQKGIQKPKSGTQGNYDDDWKEFYSTDNKYDAAGYSVDNENPLSGKAGGVVKVTYPGLTKVLALKVDNAETIKKELGLSLTEPLMEQVGTEEFIKRFGDGASRVVLSLPFAEGSSSVEYINNWEQAKALSVELEINFETRGKRGQDAMYEYMAQACAGNRVRRSVGSSLSCINLDWDVIRDKTKTKIESLKEHGPIKNKMSESPNKTVSEEKAKQYLEEFHQTALEHPELSELKTVTGTNPVFAGANYAAWAVNVAQVIDSETADNLEKTTAALSILPGIGSVMGIADGAVHHNTEEIVAQSIALSSLMVAQAIPLVGELVDIGFAAYNFVESIINLFQVVHNSYNRPAYSPGHKTQPFLHDGYAVSWNTVEDSIIRTGFQGESGHDIKITAENTPLPIAGVLLPTIPGKLDVNKSKTHISVNGRKIRMRCRAIDGDVTFCRPKSPVYVGNGVHANLHVAFHRSSSEKIHSNEISSDSIGVLGYQKTVDHTKVNSKLSLFFEIKSGSSAVTEYYLNHGEWPGNNTSAGVATSSEIKHHHHHH

SEQ ID NO: 205 - protein, 556 aa, Artificial Sequence
  source: /note="Description of Artificial Sequence: Synthetic polypeptide"
MKKIWLALAGLVLAFSASAGADDVVDSSKSFVMENFSSYHGTKPGYVDSIQKGIQKPKSGTQGNYDDDWKEFYSTDNKYDAAGYSVDNENPLSGKAGGVVKVTYPGLTKVLALKVDNAETIKKELGLSLTEPLMEQVGTEEFIKRFGDGASRVVLSLPFAEGSSSVEYINNWEQAKALSVELEINFETRGKRGQDAMYEYMAQACAGNRVRRSVGSSLSCINLDWDVIRDKTKTKIESLKEHGPIKNKMSESPNKTVSEEKAKQYLEEFHQTALEHPELSELKTVTGTNPVFAGANYAAWAVNVAQVIDSETADNLEKTTAALSILPGIGSVMGIADGAVHHNTEEIVAQSIALSSLMVAQAIPLVGELVDIGFAAYNFVESIINLFQVVHNSYNRPAYSPGHKTQPFLHDGYAVSWNTVEDSIIRTGFQGESGHDIKITAENTPLPIAGVLLPTIPGKLDVNKSKTHISVNGRKIRMRCRAIDGDVTFCRPKSPVYVGNGVHANLHVAFHRSSSEKIHSNEISSDSIGVLGYQKTVDHTKVNSKLSLFFEIKSGS

SEQ ID NO: 206 - DNA, 1857 bp, Artificial Sequence
  source: /note="Description of Artificial Sequence: Synthetic polynucleotide"
atgaaaaaaatctggctggctctggcaggtctggttctggcgttctccgcctctgctgttaccgagtattacctgaatcacggcgaatggcccggcaacaacacttctgccggcgtggcaacctcctctgaaatcaaaggcgcagatgacgttgttgacagcagcaaatccttcgttatggaaaacttctcctcttatcacggcaccaaaccgggctatgtggacagcattcagaaaggtatccaaaaaccgaaatctggcacgcagggtaactacgatgacgattggaaagaattctacagcaccgacaacaaatatgatgcggccggttactcagttgacaacgaaaatccgctgtcgggcaaagccggcggtgtggttaaagtcacgtatccgggcctgaccaaagtcctggccctgaaagtggataatgcagaaaccatcaaaaaagaactgggtctgagcctgacggaaccgctgatggaacaggttggcaccgaagaatttatcaaacgcttcggcgatggtgccagtcgtgtcgtgctgtccctgccgttcgcagaaggtagctctagtgtcgaatatattaacaattgggaacaagcgaaagccctgtccgtggaactggaaatcaactttgaaacccgcggcaaacgtggtcaggatgcgatgtatgaatacatggcacaagcttgcgcgggtaatcgcgttcgtcgcagcgtcggctcctcactgtcttgtatcaacctggactgggatgttatccgtgataaaaccaaaacgaaaatcgaaagtctgaaagaacacggcccgatcaaaaacaaaatgagcgaatctccgaataaaacggtgtccgaagaaaaagctaaacagtatctggaagaattccaccaaaccgcactggaacatccggaactgtcagaactgaaaaccgtcacgggtaccaacccggtgtttgccggcgcaaattacgcagcttgggctgtgaacgttgcgcaagtgattgactcggaaacggccgataatctggaaaaaaccacggcggccctgagtattctgccgggcatcggttccgtgatgggtattgccgatggcgcagttcatcacaacaccgaagaaattgtcgcccagtctatcgcactgtcgagcctgatggttgctcaagcgattccgctggttggcgaactggttgatatcggctttgcagcttacaacttcgtggaaagtatcatcaacctgtttcaggttgtccataactcatataatcgcccggcctactcgccgggtcacaaaacccaaccgttcctgcatgacggctacgcggttagctggaatacggtcgaagattctattatccgtaccggctttcagggtgaatctggccacgacattaaaatcacggctgaaaacaccccgctgccgattgccggtgttctgctgccgaccatcccgggtaaactggatgtgaataaatcaaaaacccatatctcggttaacggtcgcaaaattcgtatgcgctgccgtgcgatcgacggcgatgtgaccttctgtcgtccgaaaagcccggtctatgtgggcaacggtgttcatgctaatctgcacgtcgcgtttcatcgctctagttccgaaaaaatccacagtaacgaaatctcatcggactccattggtgtgctgggctaccagaaaacggtggatcataccaaagttaatagcaaactgtcactgttcttcgaaatcaaatcaggctcgtcagccgttaccgagtattacctgaatcacggcgaatggcccggcaacaacacttctgccggcgtggcaacctcctctgaaatcaaacatcatcatcatcaccactaa

SEQ ID NO: 207 - protein, 620 aa, Artificial Sequence
  source: /note="Description of Artificial Sequence: Synthetic polypeptide"
MKKIWLALAGLVLAFSASASAVTEYYLNHGEWPGNNTSAGVATSSEIKGADDVVDSSKSFVMENFSSYHGTKPGYVDSIQKGIQKPKSGTQGNYDDDWKEFYSTDNKYDAAGYSVDNENPLSGKAGGVVKVTYPGLTKVLALKVDNAETIKKELGLSLTEPLMEQVGTEEFIKRFGDGASRVVLSLPFAEGSSSVEYINNWEQAKALSVELEINFETRGKRGQDAMYEYMAQACAGNRVRRSVGSSLSCINLDWDVIRDKTKTKIESLKEHGPIKNKMSESPNKTVSEEKAKQYLEEFHQTALEHPELSELKTVTGTNPVFAGANYAAWAVNVAQVIDSETADNLEKTTAALSILPGIGSVMGIADGAVHHNTEEIVAQSIALSSLMVAQAIPLVGELVDIGFAAYNFVESIINLFQVVHNSYNRPAYSPGHKTQPFLHDGYAVSWNTVEDSIIRTGFQGESGHDIKITAENTPLPIAGVLLPTIPGKLDVNKSKTHISVNGRKIRMRCRAIDGDVTFCRPKSPVYVGNGVHANLHVAFHRSSSEKIHSNEISSDSIGVLGYQKTVDHTKVNSKLSLFFEIKSGSSAVTEYYLNHGEWPGNNTSAGVATSSEIKHHHHHH

SEQ ID NO: 208 - protein, 437 aa, Plesiomonas shigelloides
MFYVHFIMDKKMKFDTLNAKIGIIGLGYVGLPLAVEFGKKVTTIGFDINKSRIDELRNGHDSTLECSNLELLEATKLTYACSLDALKECNVFIVTVPTPIDKHKQPDLTPLIKASETLGKIIKKGDVIIYESTVYPGATEEDCIPVVEKVSGLKFNIDFFAGYSPERINPGDKEHRVTNILKVTSGSTPDVAEYVDQLYKLIITVGTHKASSIKVAEAAKVIENTQRDVNIALINELSIIFNKLGIDTLEVLEAAGTKWNFLPFRPGLVGGHCIGVDPYYLTHKAQSVGYHPEMILAGRRLNDSMGQYVVSQLVKKMLKQRIQVEGANVLVMGLTFKENCPDLRNTKVIDIISELKEYNINIDIIDPWCSTDEAQHEYGLTLCEDPKVNHYDAIIIAVAHNEFREMGESAIRALGKDEHVLFDLKYVLDKKSIDMRL

SEQ ID NO: 209 - protein, 345 aa, Plesiomonas shigelloides
MDIYMSRYEEITQQLIFSPKTWLITGVAGFIGSNLLEKLLKLNQVVIGLDNFSTGHQYNLDEVKTLVSTEQWSRFCFIEGDIRDLTTCEQVMKGVDHVLHQAALGSVPRSIVDPITTNATNITGFLNILHAAKNAQVQSFTYAASSSTYGDHPALPKVEENIGNPLSPYAVTKYVNEIYAQVYARTYGFKTIGLRYFNVFGRRQDPNGAYAAVIPKWTAAMLKGDDVYINGDGETSRDFCYIDNVIQMNILSALAKDSAKDNIYNVAVGDRTTLNELSGYIYDELNLIHHIDKLSIKYREFRSGDVRHSQADVTKAIDLLKYRPNIKIREGLRLSMPWYVRFLKG

SEQ ID NO: 210 - protein, 421 aa, Plesiomonas shigelloides
MFRKMIDAGGTFLLKAIFQIGVFVYFAHVSDITTFGIISYVFTVYWFVLNFSDYGFRTKLVKDISDNSYSASELLSRSDGVKTYVFFFIFIIFMFYSYVSDSISLTLLVYISSAYFVCISSGRFSLLQAVGRFRCELYINIYSTIIYIGCNLFLSLFIEPLYYSAISIFIYSISLLVFSSHKCNVPCFHIKRPSLLVYKDFLDATPFAILVLLNVVLSSIDLFILKEYFSYNSVAIYQVVTRVNTGLMIVFNVIYTVLLPSFSYYLKNSEWGNIRKLQRYISLLVLLLCLCYYFFGIYFVGILFGDEYKVISSATFLIMFMALIKYNFWLINELYLVCSGNQSERVKSYCIGVVISIAVFFYFIPRYGWSGAVFGSAIATLVIGIFYIISVKKDCGKILHDKYSLMMIFVPIFFYFIINGQ

SEQ ID NO: 211 - protein, 395 aa, Plesiomonas shigelloides
MLIYLYPVLLLFNILPVFFYGQMNSDLERFFGVPIGYISDLIFYFFVALTSIITLRFHVSLWTKKLLFLGIIFLIYISIQMLLLSADISGVVILLSFFSNFIALVLLVSFCIGKDELYLTHSVRNINVVMCFGIICGVVKLFIGYSEDSNFIVYLNRNATAIIVVCFYCVYSYFYRGRKSWYVSSVLYSLFFLFLDSRAGIISFAISLFFVFLQLTKKEKLLISLFFVPLLTLGISFTDIGTRLERMLSSSQVIFSGGNTLTKSQNDYRRVELVFIGVDVLKENYLIGTGLGVANYVKAIDKKFLGSTNFGLAHNFYLSYSAQLGIIGFILLISVFYIMLSPIFKCGGYIGKGCVFALAFYVFFNEYILTPAIYIYISIFLSVVFIRNSRMRICC

SEQ ID NO: 212 - protein, 414 aa, Plesiomonas shigelloides
MLLEYVERKISLALSKYPKVRDVIKFFYLYIASLFGIILNKNKTVIQSKIYEISIDDSEESFFGYYDHSPMSSNGRYVLFHSSAFSTKRHPKKVKYISICVKDLLNNKVYKLYDTRAFNWQQGSRLMWIDDDNIIFNDYENNGYISVVYSLSLMKVIKKINYPIYDVNNYKAVTLDFSWLAKYDSDYGYYNKKSFSTDISIINLNTGGIELFLSLDEMLKRTNFKCNIDVEHVVNHFMFAPDGRSVMFIHRYYTPKGKRERLIHWNLINDNVRVLINESIISHCCWNGNDEIIGFFGAEIDSLNYYRLSIESCNTEKLFFDARKYSDGHPTIVHNRYIISDTYPDKNRIKKLFVYDLVKNDYRELGLFYESMSFFSYSRCDLHPRISVDNRFLFVDSVHSGKRKLYFMRSGICE

SEQ ID NO: 213 - protein, 331 aa, Plesiomonas shigelloides
MVFVSDVLVSLIIVCFNAEKYIEKSLLAFINQDVGLDKFELIIVDGDSSDNTISIVQDVFSKHSNIKHKIINNKKRTLATGWNIGVLEANGKFVCRVDAHSDIPNNYISKLLDDYFNIMQFDDSVVGVGGVLTNSYKTKFGSIVADFYASKFGVGNSPFRCVDKNNRLKKTDTAVFALYNKDVFFDVGLFNEVLDRNQDIDFHKRVLSNNFSLYTDNSLFVEYYVRDNFKDFIKKGFLDGFWVVMSGAYYFRHIVPLFFVLYLIVSFSLFFATGDYIYLSFLFSYFLISILFSIRDGRSFIGKVFLPFIFLSYHISYGCGSLLSFLKRYFK

SEQ ID NO: 214 - protein, 384 aa, Plesiomonas shigelloides
MKNFIPFALPEIGEEEIAEVIDSLRSGWITTGPKAKQFEQEFSNYLGANVQSLAVNSATSGLHLALEAVGVKPGDQVIVPSYTFTATAEIVRYLGADPVIVDVDRKTFNISVDAIEKAITNKTKAIIPVHFAGLACDMDSILSIAKKYDLKVVEDAAHAFPTTYKGSKIGTLDSDATVFSFYANKTMTTGEGGMVVSKNKDIIERCKVMRLHGISRDAFDRYQSKTPSWFYEVVAPGFKYNMPDICAAIGIHQLRKIDDFQKKRQRMAKIYDDALKELPLELPEWPTNASDIHAWHLYPIRLKTDSAINRDDFIKKLSDLGIGCSVHFIPLHKQPVWRDTYNLNASDFPVSEECYLNEISIPLYTKMTDQDQLFVIESIRQLFM

SEQ ID NO: 215 - protein, 196 aa, Plesiomonas shigelloides
MKRIFDVIVAGLGLLFLFPVFIIVSMLIVADSKGSVFFRQYRVGRFGKDFRIHKFRTMFIDSEKKGRITVGQDARVTRVGWYLRKYKIDELPQLIDVLSGTMSLVGPRPEVREFIDEYPDDIREKVLSVRPGITDLASIEMVDENEILSSYDDPRRAYIDIILPIKQRYYLDYVANNSVKYDCVIIWKTIIKILSR

SEQ ID NO: 216 - protein, 639 aa, Plesiomonas shigelloides
MIDRILELPRIVKRGIIICIDVVMVIFSFWLSYWLRLDEQTAFLSAPMWFAAAILTIFTVFIFIRIGLYRAVLRYVSAKIMLLISVGILASTLSLVVISYSLSIMLPRTVVGIYFLVLLLLTSGSRLLFRMILNYGVKGSAPVLIYGAGESGRQLLPALMQAKEYFPVAFVDDNPRLHKAVIHGVTVYPSDKLSYLVDRYGIKKILLAMPSVSKSQRQKVITRLEHLPCEVLSIPGMVDLVEGRAQISNLKKVSIDDLLGRDPVAPDAKLMAENITGKAVMVTGAGGSIGSELCRQIVRYKPAKLVLFELSEYALYAIEKELSTLCDKEGLDVSVIPLLGSVQRQNRLQMVMKSFGIQTVYHAAAYKHVPLVEHNVVEGVRNNVFGTLYCAESAIDSGVETFVLISTDKAVRPTNTMGTTKRLAELVLQALSARQSKTRFCMVRFGNVLGSSGSVVPLFEKQIAQGGPVTLTHRDIIRYFMTIPEASQLVIQAGAMGHGGDVFVLDMGDPVKIYDLAKRMIRLSGLTVRDDKNPDGDIAIEVTGLRPGEKLYEELLIGDSVQGTSHPRIMTANEVMLPWQDLSLLLKELDQACHDFDHERIRSLLLQAPAAFNPTDDICDLVWQQKKSLLSQASNVIRL

SEQ ID NO: 217 - protein, 6 aa, Artificial Sequence
  source: /note="Description of Artificial Sequence: Synthetic 6xHis tag"
HHHHHH

1-24. (canceled)

25. A modified carrier protein comprising a carrier protein that comprises at least one GlycoTag, wherein the at least one GlycoTag is a Neisseria gonorrhoeae PglL GlycoTag (NgGlycoTag), Neisseria lactamica PglL GlycoTag (NlGlycoTag), or Neisseria shayeganii GlycoTag (NsGlycoTag), or combinations thereof.

26. The modified carrier protein of claim 25, wherein the at least one NgGlycoTag consists of a peptide sequence that is 12 to 30 amino acids long and comprises therein the sequence SEQ ID NO: 147.

27. The modified carrier protein of claim 25, wherein the at least one NlGlycoTag consists of a peptide sequence that is 12 to 35 amino acids long and comprises therein the sequence SEQ ID NO: 151.

28. The modified carrier protein of claim 25, wherein the at least one NsGlycoTag consists of a peptide sequence that is 12 to 31 amino acids long and comprises therein the sequence SEQ ID NO: 164.

29. A modified carrier protein comprising a carrier protein that comprises at least one GlycoTag, wherein the at least one GlycoTag is a Neisseria meningitidis PglL GlycoTag (NmGlycoTag) consisting of a peptide sequence that is 12 to 19 amino acids long and comprises therein the sequence SEQ ID NO: 142.

30. The modified carrier protein of claim 25, wherein the carrier protein is selected from the group consisting of cholera toxin b subunit (CTB), tetanus toxoid (TT), tetanus toxin C fragment (TTc), diphtheria toxoid (DT), CRM197, Pseudomonas aeruginosa exotoxin A (EPA), C. jejuni Acriflavine resistance protein A (CjAcrA), E. coli Acriflavine resistance protein A (EcAcrA), and Pseudomonas aeruginosa PcrV (PcrV).

31. A modified carrier protein, characterized by a Pseudomonas aeruginosa exotoxin A (EPA) carrier protein comprising at least one Neisseria meningitidis PglL GlycoTag (NmGlycoTag), wherein the at least one NmGlycoTag is located at, with respect to SEQ ID NO: 1, residue A14, D36, Q92, G123, E157, A177, Y208, N231, E252, R274, A301, Q307, A365, S408, T418, A464, A519, G525, A533, S585, K240, or A375, or combinations thereof.

32. The modified carrier protein of claim 31, wherein the at least one NmGlycoTag consists of a peptide sequence that is 12 to 29 amino acids long and comprises therein the sequence SEQ ID NO: 142.

33. A nucleic acid molecule comprising a nucleotide sequence that encodes the modified carrier protein of claim 25.

34. A vector comprising the nucleic acid molecule of claim 33 and wherein the modified carrier protein nucleotide sequence is operatively linked to a polynucleotide sequence encoding a periplasmic signal sequence, optionally further comprising a nucleic acid molecule that comprises a nucleotide sequence encoding a Neisseria meningitidis PglL (NmPglL) Oligosaccharyltransferase (OTase), Neisseria gonorrhoeae PglL (NgPglL) OTase, Neisseria lactamica 020-06 (NlPglL) OTase, Neisseria lactamica ATCC 23970 PglL (Nl_{ATCC23970}PglL) OTase, or Neisseria gonorrhoeae F62 PglL (Ng_{F62}PglL) OTase.

35. A gram-negative bacterial host cell comprising the vector of claim 34.

36. A conjugate comprising the modified carrier protein of claim 25 and one or more other molecules.

37. A method of making a conjugate, comprising contacting a PglL OTase and a PglL Glycan Substrate in the presence of the modified carrier protein of claim 25; thereby making the conjugate, optionally then isolating the conjugate.

38. An immunogenic composition comprising the modified carrier protein of claim 25 covalently attached to one or more immunogenic glycans.

39. The immunogenic composition as in claim 38 for use in inducing an antibody response in a mammal.
